United States Patent Application Publication US 2008/0114160 A1 - sequence listing, part 86

SEQ ID NO: 50039 - DNA, 962 bp, Oryza sativa
ttatcctacagtaaaaaaataaatatatttaccataaaatagacgatagattttaatatactactaatgtgataagaatgtccctcgaatttaaataaaaattcctttgtcctagtcatatataaactggttgtttatcatcattacttactatcattgttttaagagttaggtgcacctttaataaatgaaactatattagtaccactaaaataaatgatacattattgttacattataaaaattcatcacttattttcacatctatgtataaatagtataaatataacatatctacagaataatacgataacatctttaaaaataaacatgaatacctctctaacggatgaagtcaaatgtatctgccaaccaaggctttcatatgtaatgccttgaaacatataggttccacgtcgatgtagccatgcccctaaaaaaccatcgtagagtactattttaacacttagtttactattgttacactcacaaatgattatattgataagtctatcactttagttacattgtctatggtgacctttcatggacagtaccttaactcaacaatgtgcatgcccatgcaatatttacgatagcatagcaagtactgcaccttacattaaaggacaaagaaggacagaaaggaggtgattgaaaccattttttttaaaagtttcgagtcgatttttggtagagaatagccaatgtgtatatcaagttagtaataagtgcttctcaaagtttaatgcaatacaaacagtattatgtttttcaaatgagtggggttaatcattcggcactatttagaaaaaaagagctatagctaaagagacgtaccaccatgaaaatctacaaaacaccatatcattatttatattttgataaagattcatactttagcgctagattttttaaccatatattgtttataactaaatgagactcatttactaattgta

SEQ ID NO: 50040 - DNA, 718 bp, Oryza sativa
tcaaaagattcgcctcgcaatttacacgcaaactgggcaatgggttttttttcatatttaatgtcctatacatgtgtttaaagaatttgatatgatgtttttgaccaaaattttttggatctaaacaaggtcttattatacttgtgtttcaaactttcaataatgttttatgtacgtattgaaagctggatgagtacacaaggaattatacttgttctggtagcccggcgcccgggcctgcttctactgcgatataaatgattccggttaaatgacaacgatcgtttcatcgaaggattgacaacgctattgatggatgtgatttcctaagactactctgcgctgaaacgatcgacgacttgccagtcgtcacaaatgggggcaacgtcactgtccctgtagtgacagatcatctgcatctactggtgcaggtgcataatagtaaccgtgctatcccaaatttccaatgtgagctcattaagcccaacaatttcatagcaaaactgtgtgaaatggacgagtgaaaatttgggtaggaaaattgtccatgttatataggcacttataggtaacaataaggtggaagtgtttctaaataaataagcaagaataatcagcaataactatattaatacttactccctccgtattttaataagacgagtggtcaaaatgtcggttaaaaagtcaacggcgtcatacattaaaatacggaggg

SEQ ID NO: 50041 - DNA, 643 bp, Oryza sativa
tgaggatggggttggtgtctggtggtggtggtggtggcgggggagaaggtaaaggtgggccaccttggatgttggggttgctaccttcgggttggttgccatcaccagtagcagcagttctcctggttgtcaccatctgaaataccccaaaacaaaccagccaacagagagaacagactattaaaactaaccacccacgactaccaaaattattgaacttattactgatataaaatgggttcattaaggttcaggatgcttaagccaataaaataaagacaggctccgacacaatcataccacacaccggtacaaccatgccccacacgacttcaacaggaagacaaagagaaagaacacactcgcaagcctactaactgctcgtctacttctgcgacgggccagggcggaaggtgagcagcagcgcatcctccgtgctaccaatgccggaggtttccccctcctgaggaaccacgggcgcgggctcggcacgaggggtttccacgaagcaggtccacgccagggactaacgaacaagctcaggcctggaggtgctcttgcgggcagtgatcttctggctgcggcagacgcggcggcgcttgggacggcagacctctccctgggcgaccttgagctgacacag

SEQ ID NO: 50042 - DNA, 535 bp, Oryza sativa
tgcttcctcaaatcaaattgtttcctcgagttcaacatagagattctgcagaacagttattacagtccaatgcattttttttccaggtggtttccaagacaaattggtgttccatcggacgagtaatgcagccaccatctgtcgttatatcttgacagagccgagaaggaaaatcctccagagattggccaccatttgcatggtcagttgattctccattaccctacccttcttgttcctatagaagctcagaagcgggcaagcggcttgttttgcgacgcaccactgacactgtctctgttcatcactgcagcaaccggatggcgagcaaggcgacagagatgggaatttttttcgtttttagattttttttaatatttacagaaataatctatcggcgagaaaaattgcaaaaatagaccctgccgccccaatggtgggcggcaagctgacgtggcaaacgggggaggaacggacggtgacggagggtggttttttttgcatgaaaacccttgccgccctttggtggggcggc

SEQ ID NO: 50043 - DNA, 513 bp, Oryza sativa
gttaattgtttgtgacctaaaaaaatcaaggagtgagtggcagcacagtaggtcagaggcaaggaacaacaagaatggtccaatgtgcaatataaggtagcaaatcccggtccaaagtgaaaacatcaaacatagcctagtccaaagtgaactttggcaataataagtggcctaaagtgcaattcactcgaaaatatatcgtgagtagtttattgcgtatgttacttgattgttcatttgttatcaaaactatttgacaaagagaaagacatacatatgggacaataaatctcatgatggactaaatggttgttttatagcaagatcactggcttgaaatatttttcataattattttttagatttatgtaatatttatgttgcccaattatcatatagttctgaaaattcaaaaaaaatgaaaatattaatctcaagaagtattctattaaatcatatctacttaaaaatacacaactaaattgggttgttttccattattttacatatgta

SEQ ID NO: 50044 - DNA, 1632 bp, Oryza sativa
ttagttatattagattttgtttccaacataatgctgaaaagggtcaaattttctattatattttatttaaatatttagttattttcattatttcagtactcctaaaatattaaaacattgctatttagaatgggtttcaatttttttaaaaaaatgttaaatttagaaaaaaaaagttcagtcttcaattatttttatcatgttatttttttatagatttccattccatcgagcgtctcttaaatgttttgatctctgcaatttggaatggccatacaacttggcatgggataaaggtatcccttaaatattttcaatgtgctgtgtatgacaaatagatcctagacggggtacacgttatgacacgaaaaaatgatataattataagctttttctctaatctattagtgacatcagatatcatatgtataatttagatattatgatcatcttaggaacgtttatttatccctaaaaagatcatttattcataaaagtgcatctaattaagttcaaatataagtaaatagcccatatatgcatgttaagaaaaattaactatttccactggtgaggaaaaatatatcaatatttacaacccccaattatttttattggattcaaaattgaatatgttttataatatgaatggtttgggtagaaaatattactatgttttttataaactaattcaagtaatttgacattgacaaaatttaaaatgacttataatctgaaacataaggagttggaagaaggagattagatgtctagcatggataaataatgggttgaccatttattaaaaacataaggtgagatattttaatttttaatgagaaattttagtgttctattttatttattggaggcttaaaggtggatagatgtggtccacaatgtaagtcaatacagatattaaattatttatttaattaaaaattaaaatagtgtagaaatatcataaatgaatatacgatttaaaattttatgagtgttttaaagtctagtttatattgtttctgtaagtgctagctggaggagaaagataaaaaaagcccattatagagggaaagctagctagacttgttaggtggagtccatttttggagtttttttatcctaaagataatgttgggtttagttactagggagataaaaagaacagagaaggaatggtagggagagaggaatcagaggaatggaggaatgtgagggagttttgggatttttttttaaagatagatctaaccatataagatagtggatccatcgatttaagtggagagcaatggttagatgttttattttcatttgtcatacttatagatttattttaatttattatagtgttacaaggcgagatcgacttaaaagtgtttatgggcgtaccattaggccctgacatttgtagttagaacggcagcatgatctaatttttagataacaaaatatgagtgatatggattttgaattttatatttaattatacataacataacaattgaaaaaaacctgagtataaaattataatttgagagtcgcgatcaattagatgtccgaattattttttgatatattgagtgttaatgagaaaatatgataagttagctagaaaataggagaggatgg

SEQ ID NO: 50045 - DNA, 645 bp, Oryza sativa
ggaaattgattataaaactctttagcatttagttgtttcaccttccactccccatttagcccaacaaatagatgcttcagctctgcaaccacttttcccacagaagcttcaggaagaatcacagttagtatacctttcacagggagctctagccaactctatatcagaaatctcaacttgcaagctgtaaaaaccttgccagggaacccaaacccacacagcttaatacccttctttcccaaaagcaatggacagtgagaagagatatggccagtattgtgacaggagtagtagaggtgagggttagggcacgttgcctgatggtgaccttcacgcccacactcgaagcattttatcctcacctcgatccgccgctctcgcaccacgatctgcctcgccaccttgacgcccttgagatcttgcacctagattccccgttggattttgagcgagaagttggcgtcgaagctcatcctcttcgcgcgcatcacggttcccctaatctccacctctaatcggatccgtcacccttcgcttgttgacttgccactccggccgaatttggagggcgcttgtccatcaccacctctgtgtatgaacgatggtcgcgcttgcgctctggaactctcagatacggcgagcacc

SEQ ID NO: 50046 - DNA, 578 bp, Oryza sativa
atgtgacttgccttgctccgggagaacggccttccgaaccttcggcgacgaccacgaaccacgtttcgggaacctcctgaacgacgaaagctacgcgaagcacacaagcaaagctacaagcctataaagaagcaataacaatacataaaaagaaagcacacggttctttaggttataacaaacattaggagacttgaacgggtcgattcagagttcgtatgaccaagatatgatcatccgaagtttaatgctgttacatggagatttgcggattattgtaatgaggttttgcaactataaaacatgtggaagcgctagcctggaaaagacaggaagctgcgctgttgacatgcggaccccacatgtcaacctaaaggaccacggtagaccgagtacacagagacggtccacgggtcgacggaagcggaccccgtgtgtcaaccgaggcgagtggccaacaaacggactccactagacaccacacgggctgcacacgtggaaaccacgctgctactgagcggacacactaacacggacaccacacggtcaccacccgcacacatgaaccactaccgaca

SEQ ID NO: 50047 - DNA, 1408 bp, Oryza sativa
  unsure (1)..(1408): unsure at all n locations
ggggaggagtgaattgatcgctgcccccatcgccaggtgagcgatcgcccatttgccattagtatgaaaccgaccatgtatcaccgattctatccttttaattttatgagcgatgacgatgctgatgatttatgtcttatatagttaggaagtacaaattttgtaagtataacttatagcgccatctatttatcaatttaccaatttttttcttatttatcaatcactgtttaaacagtagatcaatatgcaaccattcacatttatacatgatttcttgtggtgaagcaaacgatgttctaacctactctagtgcaaattcttactagcatgaaacataaaatatgacttacgtaaacataataatgcatctggattaaccctgaaaataaaaacaaagtaaagtaaaatatgcatttcatttgtgttgaagttgcagtaattttattttgtgcatgtttgggccaagcaggcttgtgcaagtttaggcgatttattgtccaggtgtaggtgactgacagataagaaaatatcaagcgaatgataaaaactaaacggataattttcttcatccaatacatgttgaattgtcatcattttttagtgtctcgtgtattatcgtgtgggnnnnnnnnnnnnnnnnnnnnnnaaagagccctactcatcttgcataatagtgcatacatagcaccatttcgaagtagggtacgtccatcaaggccaggaagatattgtatatcatttttgtttaaaaaaatgtacttaattaaagatggattttttaattccgtttgaatttttatttctattttttaaaagtatgagatcaaacacaagtacaatcaaaagtcaaaaccatgcatgtatatctttagctgtactgaaatgccagaaattcggtgattttttttcagaatatatgcattatattgttctaaaacttcccaaaataatattctgccctgattttagaaacacctcccaagtcacacaacaaccctagctagggtgtggcatctgaagactgaaaatagtttttgttttgcactagaaccagagataatgctgctttattttcgtccttattggctgacgccagcgagtgtctgttgaaaatctactactagctagtgtgaagaaaacaattcgggttcaccaaggtttcaagagaaaaaatgattttccttaccaatgatgacacggaaatttattaaatcagccgtaaaatccatgcgaatagaacatatatacacgtggtgctaagtttaattatggaacctccatagtcatatcatatcatactctccctccattccaaaataatcatcatattacataggtacatcaaaactttaaaaaaataataattttctcatactatatttactccaacaataaacccgatgca

SEQ ID NO: 50048 - DNA, 568 bp, Oryza sativa
tttctgcttttgggatgtattccggaccgctcggtccgatgatttaagactacgcctgcgggcttatgttgtaataatttgcactagactctcgtgtatgtgcgtttggtatctcggctatgaactcgtgtgtaccagactacttgatccaaggaaatggtactgtttacacgattgattcctgttataaaaacgggggtctacagagctggtatcagagccatacgactgtaggaaaagaccaaaaggcgccccacccccttttctaagttggccaagggagaaattcccatttagtaatactttcaaaaataaaaatgctatgttcacaaaactctatacgattttcatcttactcttaactattttcttcacaaaacaagttttactctcagctgactttgggtttttcttaaacttagatggcagatcaggattcacccgctacctgggatgatgggcgtaccccgctcagagggatacgtcattgagctgcatcggttgatgaggcgtctacggtaccccagatttccgatctaccgagtgagacagtgtggatccgtttggg

SEQ ID NO: 50049 - DNA, 965 bp, Oryza sativa
gagagagagagacagagacatagaagtagaagaaggaggaggacgagagaagggaagggggtggaatgggaaatgaaggtggaggggaagaggaagaggagaacacgcggcacttagatgtcaccgcgcgagaggagggagcgaccaccgcacggactcccccacttgccactctcgccgtcgccgcggcctatgtactctcctactactagcaatagtggagtaggagtaggattatatatatccacatccacatcatcgcttgatttaattgtccactttcccgtgcgccgaattcggaaaagtcgtctagatcgtctccgcctccagctagcgactccgtcttcttctgccgcagccgccgcccgcgcctcttggcttcttcctccggcgagctaccggcctcctgttccgttcccgttaattttttcctaagccgcgaggattagagcaaattaaatttaatagtatagcccactactaactccaattcatttatagccaatctaacagccaattcttacgataattgtttactatacttttagtatatggccccacatgtcatacatacattgtgtcttaaagtctgtatttttctctcatcttttatcttattataaaatatgtttgtacctggctaatagtctgttattgtacctgctcttatatatatgcgtgaaaaacacggtttctccaacaactttatagaacaaattagtataaacctaatttgttgttaggtttataatgtatgtatactaagggagtgtttgaggagaaggggattgaggagattgggaagatacgcaaaacgaggtgagccattagctcatgattaattaagtattaactattttaaattccaaaaatgaattaatatgattttttaaagcaactttcctattgaaattttttgtaaaaaacgcaccgtttagtagtttgaaaagcgtgcgcgcgggaaa

SEQ ID NO: 50050 - DNA, 569 bp, Oryza sativa
cgagcgctctgaaaattccactaaaaatcctgttagtgaatttcgacatgtagaactcaagaaaaattccacatgcccactccgattattatttgcattgatttaacagggtttactcttgctttgcaccggtattttcttagggtctcttataaattaaattttaggcttgggaggagaacttcggggtgtgacagttgctcagcctgagcttggggtttatatagcatgccagctcgtgaggtagatggacgaggtgtcaggtgtggggtagtggctgaggcgtggacccgatctcagccattgttccattggtgtactttgttgttaacggagagatgatgggtgtccagaagattattacagtagaagtataatagatttaatctaatcttccatcaaaacattgcaataaagcaaaggagaacgttaatcgttcttcattcatggtaagtcattcataaatcatacgtacattacaccaccacaactacattagtagaagtacataatccatacatcattcgtacattacaccaccgcaagtacattagtagaagtacaccaca

SEQ ID NO: 50051 - DNA, 552 bp, Oryza sativa
ccttggttgagcaaagaggtgttattatgggctggtttggtttgtggcctgaattggctttgcaaatatttaacaatttcaatagtgtttagtgtctatttagtttgaagccaaattttgacatgtctaaagaaataggctattttaatagtgaaattgggttgttttggcttcaatccgaacacaactttaccttgccaagattaaccataccaaaacttagcaaaatttgatattgacaaaaattggtaagttcaatttaagtcacaaaacaaaccagctctatgttataaatagcactcaaatcaaataacacagcgtacattctactagtcttctctctcgcattcccctcggtcttgcctggcatagacaggcaaccgccggccgtccacgcgactatgatctcgccgaacaccgccaacacggtcctcggcgtcctaggtgcgtcatcgcctcatcggcatcttaattttagctttcttcaaatcccgcgtttcattaactttgtgttgatctttttcctcgatcgatctcatcttgcaggtaatg

SEQ ID NO: 50052 - DNA, 505 bp, Oryza sativa
ggacaaagattatctgatccccatagcaacatgccactctacaggcatctctaccctttacatgattaaagtgcagaaatgaaaaagagagaagcacatttgcttctttttaggagggggagagtgaggccccaaaatgtccaatgggaggacttttatcattttctacctctctttctctgaggcttgttgaagaagagaagcctggctaacatacttcccctgcaaagaaccaaaaacatagacaaatacataagaaactttagagagatggggaataaaacttgtggaaattgatttggaacagttatcaattttgcctttgcataagttgtttgcataggaatgagttcttagaacttgccttgacccgaggccgacattcagcattcaccttccgcgattgataccgggtcttattggagaggaggggagtgcactgcttctgcttgtgccgcaatttcagcatgcttccttcccggataacaccgcttgtattattatc

SEQ ID NO: 50053 - DNA, 991 bp, Oryza sativa
agaggtgaagaggatagcgaggcaaccggaagatggaggagagagaatggaataattggggaaagaattgtcggagagcggccgggccaaataatccaaacggtccactttggtgagaatgtcggcccaagaattggcccaggagtatttttgtacactcctggcccgcttagtatattcttatatactagaggatgctccgcgcattgttggggacttagttaacatcaatttattagataggagttaccatctcatgaaaaaacaaatagttttttttggagaaattctttttagcagccctatccaaaatttgtagatatttaagtagcacatgtcaactgaaggggcgttcagccataaagctcttttatacggattgacaggctggatacatgtagatgtgtatagaaatgagccaatgtgttcatgtgagctatatttggcactgatgaggcgaagagactcacccggtgactaatgggttgggctctatgctgcattccatccaacgtctaagaagtgatttaatgtattcatcaaacgattcacaatttgatgatgatgtggaagcgcaaggtttgagcttttggccactttatagaaagaagggattgggaaaactaaatttcacaaacggaattttgctatattactgtcgacggttttaccttacgcccttagttcattgaggaagtgtgctaccaccacgccaattttttttttatgatagttgtattctagtcacatataagttacatatgagttacagtgtagttacaatatagttatattttaaaagttttataaagaaaaaacttgcgacatttttttagataatccctttcacaaaactatatgtactttgaccaaactatcataaaattgcaaatttagcatcttttttttttcataagacgatagatttaatatcaagtattataaaactatagatttaatattgatattatcacaaaactacattatatta

SEQ ID NO: 50054 - DNA, 1433 bp, Oryza sativa
caagagttataacttataagtcaaactttgtgatagatcatagatgtagcaaaatattattacttctaagaactgaagaccgacttaatattaagattctatcagcaattttttgctaggatcatttttgttgaaattgtttaagttacattattaatttgcactttataagctattatcgtgacatatttaaagcaccagttactcacacttgtcttgacttatttctatgtatatctatatatgcaattgaaggttaaaatgccaagttcaaggtgtcatgccaacttggtatgcagtttgttatttgagtataggttgttgggatgagttttgttgaagtttctagtatacaatccaatgcaatgaagttagatgcatggtgctgatgtttgaatatgtaatctatttagtgagttctgtctgttcttgaacaagtttcacactatcattaatattagtcttacaatctgatgtgcttcctggtgcatggaaagtttcatagctgagcattttgttaattggcaataagagttttaaactttatttgttgacaaacacaggaaattgttggtaatccataatccaaatccataaatggtctgttatacacttacactgaaagcatgggtcttttaaactatgcttcacattgctttctctttctgtttgtttttagtaatccatacatcaagtgatcaaagtacttagatcttatctttaaatttttgacaccttacctcataaatgtggaatctctgtttttctactaaaaacaaatctcttttttttttttgtaggggatgttgagggacctatcaaaagcacctcccacacctattcaagttgtggcatcagttaatgatggtgtaagtcattttcccccattagctgcacatctatttacatactttttgaggattctaattttcacaataagttgaaagtgaaatgactctttggctcagatgagttgaatccttgtttcgttatctagcttactgatgattgtagccatttttaagcagttgctgaaaattttggagaaattaatcaaaatattggtccacaatggcttctcaatattttcttaacttttatgaaggttaaacaagttatggtccattgccaagggattaaaaaactgtggctctagctattccattctaaatttgaggatattagatagtgtgatatactgatattgtttcctgttatactggtcactggtgtgactggttgactttcaatccatagttgtaaacttaaaatcatgacacataattggtttagctatgggaagatttaatgctgacggttgggcatctttgcatgttattttcttctctccttggtattcaaaatatgaaagctgtcctataactgtggcttttgtttactgccggttaaatatgaacttgttttcctttatt

SEQ ID NO: 50055 - DNA, 533 bp, Oryza sativa
tgaatcttaattttaaaagtaaaacaatacgagatgaatcttaatttaaaaagtaaaataatacgatgggacgaattaagccctgattagtttttacgtaaaaacttttcaccttatcatatcgaatgtttgaatacatgcatggagtattaaatatagaaaaaaaaaataactacacagattatgtaaatacaatacgaatcttttaagcctaatcgcgccatgatttgacaatgggtgggttcggatgagattgccgtggcttcagcttcacagcacaacaactacagcactagcagtaaattttgtgctgctagtactgttgatatagccaacagcagttcaacagctgcaatatgtagctcaagtgaacacggccaatgtggtcatacagtaaacatttgctaatgacgaattaattaggcttaataaaaacgtctcacagtttatatgtataatatgatgtttaataatttaaatgtgtgtccgtatatcctatgatagggctacacacaaacagggaacccgatcag

SEQ ID NO: 50056 - DNA, 542 bp, Oryza sativa
tcctagagcaagacaagatctcatggcatctgaaacacctaagggcacccacaatggttatctataagctctctacaagagatccatgtcagcatattttcctacttggaagagattaaatgaagagagagagcaaagctatctactaacatggagatagtctatagagaaaacgaggcaatggattagagagctatagatacccatgtagacataccattgaagtggtttactattaatctagtctattgttgaggtgtacatgttttatagatagcaccttactttaccattgcgggtgctctaagagcagagtttgtaaataggaacaattcatcatttacattggatatgatcaaatctactttggatattgcagacaataactgtaatattcaatgctttcagacagtgacacctatgattcgtttccatatcaaatcccatcccaactatacttatgttctcctgttctattcccaagaacagaggaagtaataaaacaaagctaatcctctagccacatcagctgatttagaagt

SEQ ID NO: 50057 - DNA, 778 bp, Oryza sativa
tatatggactttttccggcctttgccggtcggcccatggccaccttgcgcgcgggcgagcgccccctcccctcccccaggccgcaacctgggcctgggccgggaaagccgccgccgcgcgctccccacttgggccgatttcggtccggccgccgccggccgtccgatcttagggtttgcgatcggacggccgggcgccgaaaacggggatcaaaacccctcgtgccccggccggccgccgaaaccctagcttctcctctctttctctctctcgggcgggcgcggtcgcgccgagcggcgtcgccgacgccggcggccctcgcgccgctgcgccatggccggcgctcctttcttttctcttctccgctccccccaccgtctctaacccccaccgtgtgagagagagatggcgacgacggagatggcggcgccgccgcgggccccctcgccggcacgcgcgtgcaggtgcgcgcgcggccgtcgagtggctcctaggcggcgcctctttgcccctccccccctccgttgccggcgtcgacgacggccggcgacgaggtaagaattagggttagggtttttggttcttttgatccgtgcggatcttgtgcttttctttctttggatttctttccccgaaacgatctaaacactagggttgctctgataccattgttagactttgctctaggatcacctaggttagatctagtcgggtggttctatttgggtttgatgaacgacattgtagatgaaagggagagggtttagataccgatcgg

SEQ ID NO: 50058 - DNA, 1297 bp, Oryza sativa
gggagaaaaggcggcgggtattttttggggcggtggttggtttggtgggggggaatggttataaaagggtgagaatctggtttgcgcttttttggcgaccgcacctcctatcgtcttggcggctgtgccatcactgccgtcgccgtctccctctccagagagaacgacagcgttgccactgacatatgggctatgaaggtgggactcacctataagagcaagggcaatagtatagccaattaatagttctaattcatttatagtcaatctaatagctcattcatataatagttacatactgcactattaatacccggtcccacttatcatacacacagtgcgtcttggaatccgtgctacagctggctacaaatctacaatagcagactataagccagttgcaaatatattttaagaagataaataagaagagagaagagcagcgtgctacagatttgtagctagctgtagcacagactacaagacgcagtgtatatatgacaggtgggaccagatattaatagtgtattactgtgtaattattgtatggacgagctattagattggctataaatgaattgaagctagtagttggctataccattaaacttgctctaaggaatccacactaactttacgttagaggagctcgctccccaaagatgctacttcctcctccctcaagttcatttagaattgttttattttctactccatccgtttcaaaatataattctttttagacctgacacggtctactagatgctactttgaccaataatatgtcaatatctataaaagtaagatgttttaaatgaaaaaaagttatatatattataataatttgtttaatgataaacatagtaacattaattttatatgattgatctttttatttttttattaatggtcaaagttaaaaatatttgacttgctactgtactaaaaattgcttatattttaggacgtagggagtaccatttattttaaaacaagtttatttttattgtaattactgtattggagtttataaaaatatagaataattatattgggagtatataaaatataaaaatagttgtattgggatatgatataactgaggtattctaattcattttgtgtttattggcatgtgtgatattgtgagatggctgacaaatgaatttatttcaggatggggttagtaacttctatatgtatgaaatacagtttgaaatgtgtgctaatgaaaatcaaggtaaaatctatatcttaattagaacaaaaggggatcttaggtcatcatttttttttc

SEQ ID NO: 50059 - DNA, 633 bp, Oryza sativa
cccttaaaaacttgaagaagtcattacaaccatgtgatggttgatggggtataccaataacttctgcccatccatcagctgattccaattactatctttcccctattgagtttgtccaagaaaattctaaaattccttcagatgacaactacgggaagcaaagataacgagaacgaatctaatttctcaatgccagcaaccaaatccaagaaaagaccctcaggtttattaatagcatcactaaaataaaaggctacaattcaacagaatacaaaattgattagcaagcccagtattatagagaattaacactaaaaacactaaattataattttctaatgaaaagcccaagcatcaactactcctaacaagcgtgatcatgcttcaatgatttcatgttacataagaagcaattcatccatttcgttcctctgaacaagtatcataaattgatgaacatatttcagcaactaaatagtggcaaaagaagatatacaagagaagaaaacaagaatccctcacctttttcctgttaacaatgttaacacaatctaacagtctaccatcaataggacaaaaatgcatagtgttaacatgataacatctacttatgcaaattaacattggaagtgt

SEQ ID NO: 50060 - DNA, 685 bp, Oryza sativa
tgagggctgggttaacaggagttcaggtataatggggccaatatgacaggagaactttataagaactaggaatagaatcgttgggtgtaatggcatggccgaaaatgtttttgactcgttataccagaatgaaaatgacccgagagtttgttgccacgtccatgtacatatgtacgactactcgcttgtctgatgttcccctccttttttttttctttggattgatcgttttttgtttggatcctttgttacagtgtctagcagaaacgatgtacttcatgtgatgtttgcactgaatacaggatacagctggggatatcctgatgggtatacgccagctactacatgatggcactatgctatcaaagctgcgcaatgcttgtccatatatgtttggacatcctccacggcgtgtaatacccaaaatacaaatttacctttgaactgtactcgtttatctaatgtcatcgttaactggtaatatacaagcatgtcctgagaaatgaacaaatgaatttctgttttccagtcttgtaaattgccagtgcactgtgacaagtgagatctgtgaagactgaagaagatacaacgttttgctaacaagagcaagctgaattaatggcagttctcagattatcacatcaaagctactctacttttaatcagaaaaaaaaatgttcagatc

SEQ ID NO: 50061 - DNA, 544 bp, Oryza sativa
ctgcaccccgtacagcaagccagaatctgtttctgctctagccgcagcctgctgctgctgtgcttttctcatcttctgttcctttttgtttcagaaacttttaccttttcttcatagatgaccactcttgaaaaacgagttgctaacaattctcaaaaaaaaaaagaaaaaacgagttgctgacaatatcatttgactgcagtggatcagggcaggttcagagcagggggaaatatgagaaaattgagtcgtccatatacaagaatcaagatcaccacagagaaggggaaaaaaaggaaccaagatctataacaggaaaaaaaacgcgaatattagggaaggatctaatatcaaataattagaagtggtgaggcttcgaacccaggtcatctagcccaccaccttgtggagctagctggaagacccggggcgtttctctataacagggaacatgtaagagatcattgcccatgtttatggcctctgttttcttttgtgcaaagccttttgatatcgtgacttgttttttgtatctcaaaaataa

SEQ ID NO: 50062 - DNA, 756 bp, Oryza sativa
ctgcagcccttatagtagtatagatatatggtacccacttgattcaaacaaatattagactattgcataataccagaaaatatcgtgtgctaaaaaatgcaaaaagtagtggtgcaaagtagccactaccaccactagtgcctttatactccagtataccagtatatagatatagatagaaggaacttaggaagtactaaatttgcatagcagacctttgcaggcatccaagagtatttgaaggctaaaggtgaagttgatgctaataaaacaattgtttaaaaggtattctcgtgatgtctgctatctcgagtacttgttcttgatggcattgcactccgtactgcaataacatgcatgcaatcatagccaattatataaatgctctgatcttggaatgtctctttatcattcatctgttgcttctttctaactttatctaggcattattaatagtttatttttcattttccctatggttgattttgatattcttttctgtagtgctggttaaattactttccttactttttctgatatgacctcatgttcgcttgtttttctcttgtatacgtacatacatgatctcagcaaatagtttgatatgcagctagatgttgccaccgaggtttatcctgtgcatgttagcaacaaatttaatggttttaacacctactctcagtttggatggcacacagttgattgatcttgccattctgtgaaatttgcatcatacaaggttggcttttaaatgta

SEQ ID NO: 50063 - DNA, 696 bp, Oryza sativa
cgggaaacgccaccgccgcgccacgcctcatcgccgggacgtctacgaccaccactgccgcagccgtcatcaccgtcgacctcaccggcgccgcatccacgtcaagccgcgacgacaacgacgatgtccggcgcctcttcctccacgaactcctcaaccggtcggtatctaaaccctctccctttcatctacaatgtcgttcatcaaacccaaatagaaccacccgactagatctaacctaggtgatcctagagcaaagtctaacaaaattgttttggcttattaaggaataatgggcaaacaataagggcaatcccaaccctccacttaggatggtgtatatggcattaactatattgccatgtaggacttttagcttatgtgacactatattaattaagagagagtgtgaagagaggaagaaactaggtctcatgcaagacacagcttcaacacgagaacctatacactagacactatcaagttttgcattgggagagaatagtgtcttcataatagatgaagaataaatatgattggtagagaagagagatgatatatttattaatggcccactttaagaaaccatggattgtagagtgtagtttctattatgatgtcttattgacatggcaccatagacactacttatggacactatgggttgggactgccctaagtactccctccattcca

SEQ ID NO: 50064 - DNA, 792 bp, Oryza sativa
ttggtttcctgaggatatctagtccctagttcccagattctgactagtggagttctatcctaaaacggtaagtgcatcgcatcaattgctgttccttgtcttcctttttttctaatggcacagtagaacaatagcttcaaatgctgcattatccgattcaggcctaagtcaggggtgaattatttcagaaacaaatgtagataaatgctgactcgtcccaaatgctgtgaatttccccagatatgaaaactagtagctagttaatgaatccattggaaagcattagattatggccaaaacactataacaagcactaaatattatcatgaatattcgacctaaaagccagagtgtaccaacagctgtactaaaaaaaagggatatggctcacttgtatctttatctgataatagaagaaatgaaactaggcagcaacagcaacatgccagcagctgcaataggtaatgacaacctactggactaatagatggatttgaaccatcaaaacaggctcattttcacttctcaggagcaagaagtacatcacattcatcaatatcatacgtcatggtggaaccgctgcttataacatttcttttggaacaattaataaatgaaatattatgtgaacaggaagtaaacaagaataaaaatggaaacaatggtatgagccttacctgaaaaaggaaatattgacagtggtcattagaaagaggttgagatgatttaattatctggtgtagatctgtgtccatgagttcataaaccaagtatacatctttgaaactcctt

SEQ ID NO: 50065 - DNA, 1138 bp, Oryza sativa
ttcaacttatgcaatcgacttactgggtcaaaattacaccctctgagacccaaaaatagcctaatgtttgtcatcattacacccttgaccttgagacaaagacatgtatgtatatatatattcagaaaagcatgatgatgatgtatgtatatagtacacggttgctgtttgtgtagcattttctgagttacatgttagtagcatttctgcaatctccctgtatatgtctttgccatttcctttcccggccagcctaatttaatcaacaaattccccaacatcatgcacatatgtatgtgcgtggtcggtacgagtggaaccggcaataatagatactccctccatcccaaaatatttgacgttgttgacttttaaaaaatgtttgaccgttcgtcttatttaaaaaaattaagtaattattaattcttttcctatcatttgatttattgttaaatatacttttatatatacatatagttttacacattttataaaaaattttgaataagacgaacggttaaacatgtttaaaaaaatcaacagcgtcaaatatttagggaaggaaggagtaatagctagtatcctaatatctgatatcaacaagttgaagtcgattagagaaataattatatctctctgcatattaaagatttaaagtcagcgaatgctgctaccttgtttcaggctttcagctagcccaagtggctctccgtgaacatatcaacaaggaactgacagaaatgatagattcaaaggtacatacacatagtggacttgcaaggactatatatgaacaacacattgtatatatacatttgattaatctgttcgtcggcatcgtgagttttcagctgaggagagatatctagcctactaaacccaacctgatccaagcccattgtaaagaaagaaaacaaaatcaactttacaccttttcacacaagagttcaacttatgcaactgaattctcttagagtcaaattaattacacatatgatacaaagcctcatgtttgtcaaaattacacccctaggacaaagacatgtatgtgtgtatattatatatagtaagcccgaattcatctgcgccgtccgtgtgtgtcaagatgtgtgctgctgaatcttacgttccacccaca

SEQ ID NO: 50066 - DNA, 598 bp, Oryza sativa
gtgtggtaagaacatgattgaagttaattaagaaataataccactcctcaatcggcctcaaatctgcttccctggagattatatagtaaataatggatttggcatctgtcatcggggtaaggaatctgccagcaaatcatgaaaaataaacgagatttgagtgagaaacgtccctccaaatattttttttaaaaaaattatgagcgtgttagagattaaacacgaaacctcgaattaaaaccgcataccccttgtcactgcaatatcaagtgcatcttaaactgacctaagctgacctatcaagaaaaggaaatactacctgctaatacaaactgacctaagctgaaatcaatgatattcatacttctggaaaaggtttaatgggtgtcaaatgtacagatacctgggtcaatggagtaccattggaataacaattatgaatgctgtacaatttggtggtattcagaaaaaaagttgtgcaatttgacttccactagaaactgtactaactgtgaatctgtacatcatgttttcacaaaaggcttgaccgcttgacttgtttataaggtttaggaggttgctgtgggggtgatatttg

SEQ ID NO: 50067 - DNA, 694 bp, Oryza sativa
ggatatgaatgttctgttataggggtgccatttgtagtgtatcctccatatctgctaggaaataaaagagaaagcctccagatatgctagaaaataaaagataaatccttcaggtcttctagaaagtaaaaaagataaatctccagatctgctagaaaataaaagataaatccttcagatctgctagaaaataaaagaaaaatcatcaactatgggcctggttcttcccacgcatgggctatagatgggtccaaattagactagatctaaattcattaggcttatgtgtttctccaaggggagtacctatacatctttcgaaagatttttataatcgtatcacacagatttttaatctttagattaaaatccgatagatataataaaaagcaaaaagcaattaagaaacaccataatggacactaaattaccatatcctcaataaaaagaccaaatccaatacaaaatttaaaatttacatgcgaagattcaaaaattacagtgtaacttacaaaagttacagtgtaagtttcataaattacactgtaacttaccagaaaatgcactgtaaatttgagtaagaaaatcgagtgagagataagaaaaaatctttcgagtgagatatagcaaaatcgttctccaagtgcatctttctttttgtttggtgcttattgcttagtaaaattcataaagt

SEQ ID NO: 50068 - DNA, 719 bp, Oryza sativa
tctcctcttgatggttcacccataggacagatgagagaaaggacgtcaccacgccggtatatcatgtctaggaaggtgtatgatactcacaggtatcaccgatgttagtactcagatcaaacagaagcacaggtgcgacgacaaaggccgaccgactcaacgtatcctaactgattggacggtctatttatttggccgtcaaatgggttgtaattatgcatacctgctgcatcaggtttcatccaatcactaaacatttcagtatttgcgtgatctagactggtcacatatgcacgcaattgcatcaaaaaagaaaaatctagatgcatgcatgtgctacaaaagtaaattaccagtgccatgcttgttaataattagtaccacaggttgaattgctaacccctccgtcaagtacgttgcttataggcagaaacacatccattaatccatcgaaattaaactataaatagccatgcatgcgaggttagattaccacactggtggagaaaccctttgtagtcccggttcgtaacccccctttagtcccggtttctaaaccgggagtaccaatccaggactaaagatcgctatctttagtcccgggtgaaataaccgggactaaagatcgagctgaccgttttttttttttgcatggccctgttgctgcatggtttatatatatatatatataaaccatgcatatatatgtttcaatacat

SEQ ID NO: 50069 - DNA, 1330 bp, Oryza sativa
atatttttggatcttacggctatactgaaatatgtaaatttatggacagttaactcaattttgttgtcatctcaaatcttttgaagacatttgcaatttgttcgacagtctggttttgagcctgtgtgatttagatgtcttttgctttcaagttgggataggataaagaacttgttgaagaagcacatgcagttagattcgttggagtgaattgaactgatttgtagtaatgtcataaggtgctgatagatagaaatgtcagtgtaaggagcagggtttctggccgcttagaatctggttagaaactatccggaatgaaccattttagaaaggagcctttcatagaaaaagtattggccatttttatgaataaatatatatttcttaactcttcaatctgacagaggatttgctagaatacatcggtttctgttgctttttcctatatacatctgtacaaattagggcccctttgaatcacaggaatagaaaaacggaggaataggaaaaacatatgattctgacaggaatgtagtgtaaaacagagaattgcaaaacacaggaaaaacgtaggaatgatcatttgattggaccacaggaaaaacataggaatttgaggagaaataaagactcaaaggatttttttccacaaggttcacctcttgttaaaattccttcaaaacttatatgggaagaggcattccataggaatttcataggattccatagggttcattcatttgattcaaagggctttataggaaaaattcctataagactgaaatcatctaaaattcctatgaatttcctttgaatcaaagggggcctaagttgagtttaattgacaatggcattcaaaatataggttgatcaacttatgcttccagcaaaaatcttttatgggttgtttgattcgaggttattgtaatcaaatccatccatgaagcatgttttggttttgaatttctttgacctttacacaacattattaaaatactttggtagtgtacgtgattcttcattcagaaaatttatcattttaagtattgtaacaactgttgtagtgaaatatgagatattttggaggttttgggtctgcataaatgggaggaatatagagtaagacactgctgataatttatgttgttctgcctatgcaaaactcagattcatgttgcttcgctcaggtcttgtagctgtcagcatgtcacctgtagcttcttgaggctacaggtttaatctccatcattgggcatatttaatctccatctttcattattagcatgaaaaatcagtgtgctattgggtgtgtttaggaagtattatggtt

SEQ ID NO: 50070 - DNA, 2002 bp, Oryza sativa
aacattgttcaatttttagttctatacttgtagactattgagaaaaacaataccaaaacatggtagtaatgcgtgctactaacaaaccggtgaagattttgtattataaggatataaaagctattttataaatattctatattactttcggaaattaagggtattgaataaaagcttttataatttgtaaaatcgggagaaatattttttgttatgtttataggtgctatttattggttcaatttttttttatagacatggatatcaacatgggtaagttacctattttgaattttaacatagtcacttagaataatttttcactgacttttatttgtaaaaaaggaaagttttgtgaattagaaaaaaatatatcttttttcatttttcattcttaattgtttttaataattgctactcttttgtacattaattttcctttaaaacaataaaatttgtggattagccaaaaaatattttattcattttcatttttatttttatttgtaatacttgctactctttttatacaataaattttattggttatattacttaaatatatggtttctattttatgactacggtgtattagaatataaaatgacattaatcttgagttctgatcattaatatctttcgtagtagactagatcagtaatatctgaaagaataaggcgaatccaactcttcttgtatgtttaagattgccacatagattttgcactgcattccaactcctcatatctgcaagcgtgcagccagtttagttcacagttagtccctccgtttcacaatgtaaatcattttagcatttcccacattcatattgatgttaatgaatctagatatacatcaatataaatgtgagaaatactaaaataacttatgttgtgaaacagaggaagtaaaatacatccatatactccatctaattaatgattcactgtcaaccatcggttaattagcgtggctaatagtacgcgagagatccagaaggacatgactactcagaacacatccatgtgtcgttaagttatatggccatttggaccaatcaaatgctggctgaacggctagcttgagaccagtagattatgttgggtatatgaaacatgactttgctacgaagggaccggatagggctgttgatgaattttttgggccaccttggttgcacaacatcctatgtttgtgttaattttaggtgactgattttattgtgcgttcactttgcataacaacatgaccagatactatgaatcattgatgaaaatgtgcctgttgagcataactctactttttgaagactcatcatttagacatctatcattcaatgactcgctttgtttcgcgtgctggtaagaccatgtttagttcacaccaaacttcccctaaacttttaactttccatcacattacatcacatccaaaactttcctacttacataaactcctaactttttttccaaactaccaactttctctaaacttctccccaatttcaaaaactaaacacagcctaagtagctcggcctaaatgctccatagaattcagccttaaagagcgtttggaccaagctactcaacaaaaagagctgatgaaggttccgttgcataaaagcatctatcattgctgtagcaaaacaatggtgcatattagcataacacaatgcccacagaaattagccacaaaatttgcatgttttaaaaccgcaagagttattgataaacattatctaaaattcaaagaatagaacaggggaacaccttctggcaggggattatgggagtaagggagccattttatagattctgtaaaaagaaagtgggggatggaaaaataccatgttttgggtagataattggattggagaaaagccactcgcagagaagttccccagactctacaatatttccttgtcaaaacaagtaactgagacaaaagttttaaatgctggctgggatgctttgaagtttaggagaagcctggtgggggaga

SEQ ID NO: 50071 - DNA, 923 bp, Oryza sativa
cccgggcaaggacggcaagcccctcggcgccgccggcagcgccatcgtcgccatcgaagcctccaacttcatcgccaatggtgtcgtcttcaaggtcctcccttcaccttctcttcggttccataactcttaaccttttgaataagattctattagtatgtttatttaataaagatactagaataacgtatatagatttgtttacaaagtattataataaaaaagaaaaatatatttatttattatatatattatactctttacatttctggtcaaacttgcacgttgaatatttggctataatttcttttatatactacttcctccgttttacaatataagactttctagcattacccatatttatgtagatgttaatgaatctagacatatatattaacatttatatgaatatgaacaatactagaataacttacaatatgaaacggggggaatagtgggcatttagacagctatcaatgactcgtttttgtttcgcgtgccgataagtagctcggcctaaatgctccagagaattcagccttaaagagtgttttagactaaactactcagcgaaaagagctgatgagggttctgttgcataaaagcatctatcattgctgtagcagagcaatgttgcacattagcataacacaatgcccacagaaattagccacaaaatcaacaagttagaaccgcaagagttattgataaacattatctaaaattcaaagaaccgaataggggaacaccttctggcaggggattatgggagtaagggagcaattttatagattctgtgaaaaaaaggtgggggatggaaagaataccctgttttgggtagataattggattggaaggaagccactggcagagaagttccccagactctacgacatttcctttgtcaaaaggagtaactg

SEQ ID NO: 50072 - DNA, 607 bp, Oryza sativa
gtccagcccgacggttggtttgtgcttgggtctctttcttggcacgatatgctggcccggcacgatccggtctaacaacaaggagctcaaatagatttaatctagccatatgaggcacggcccaaagagatgaggggcacaaaatagatttattctaaccatacaagacagctcaaagatatgagggactaagagtagacttattctgtacggtggaggactagggagcaggcagagtaatcgatagatgcgccggttgaaggggttttgttgctcaaattgcagctagggtagaatggtttacattaccatcggtaccgcggttaccggccttaccgcggagtacggtaatagaaaaaccgctgtaacctccttaaattcaaataaatttgaaaaataacttgaatttttgcacggtttcgtgcgggttttcacggttgccgcggttaccgcgcggtaaccgtgcttacggctggggcgcagtaaccccggcctcggcggtttgggaaaccctgggtagatagaatccactgtttcaaaacattttggtccttcaaatatactgtgcatgattttttttcctccttgttgagcttaagtataatat

SEQ ID NO: 50073 - DNA, 675 bp, Oryza sativa
tatttgttgtttcagtcctagaaaacaatacagccatcctgtttcaaagaaaaaggaattcatccatattcttctgttttttccttgtacatatccgctaaatataaagttaccatggaatatatgacaactcaccggtagcattagtgagttaacaaactaggatgatcagctcagttctttcaaagataatgttgaagaacatgtacttcatttattatgtttgttcgtaatagctcatggatacaagggttgcaacccttttcgttttcattctgttgaaaactttgcttaatagtatttggtgggagttattcttaggtactttcaaatttctttatcatgtaaaaattaaatcactgatcaaaatatggatcttaaatcataggacataaaattagactaatatataaaggtaaagagcaggttgaagaaaaatccttcaataactgaggagtttctacatgatggtctgctccaacttccctctctcgcacaccacacatacacagcactggactctctcttactttggttgcattttgaagttggtatgtttctccgatagtatttaatacaccctctcctaacatgttggttaactaaaatctgtattgatagaaatgttgcagaggctacaatggacagagtgtcatctatactcttatcttggtg

SEQ ID NO: 50074 - DNA, 993 bp, Oryza sativa
catgcatgttttaatttttgttatgaactaagctagaaatatatcatatggtgaagcgtgcaaatggaatgataagtgatggcagaaacaaagattaattgagctgtggacacgcaatgaaatataagttaaattaatctgattgtacatatattagttattttagtcaatgaggagaagccaatatttgagatatgaagatattctctgttcagccctttggagttcatgtgtcgttacagatgggtagtagatgacagaacagccagcaacatgcaaagaaacaaatggaccatgagaggcccaatgataagggaggtacaatagacttggggaatggtaagtgacttggtgcaattagttgttttaatctgggggagggccagaccacggcagctcacatgaccggtaaggtgttcgacgaaatgtttatctccatgccatttcagtttcctttcctcatcttttgcccttcgttgaatcgcatccatcaactgcaaaatactagattatagcaccttgccccaacttctcctttcttcttcttcctcccttttatttctctctcgcaggcaaaggtcgcacgcagctgcgggaggccagcactgattgggccgcgtgcggcggttgggcggtggtctccggtcgcgctgatgaaatatgcagtttgaccaagggcaaaagatgatggaggcaaagtcccaaagttttcaactatatgatttaatttgttaaatgttatatattataaaaaaacaaccaagattccatgccatatcaacatttgcaaacagctagtaacattttctttttgcacgtgcagtatttttcgttgaattatccgtggctggacatatcatcaattgatcaatttcctaaccattgcgattttctcatttttctgaatttttttttggctattcggttgattaacacgtcgccgtcttctgattatcgctcctcgtgagcgcgtttgcaacaggcaaaacgtgg

SEQ ID NO: 50075 - DNA, 572 bp, Oryza sativa
tgggaaaaaaaatctatggggtgtaattaggagttcttgatggtatgggtattgcagggttgaaagttaaaattgggggcttttgcatgctgaactctgtaaatattctatcttgaggatgcctagggtagaatttagtgcacatgtggtgttctgtaggagcttttgaatgctgttctttgtaaaggtttaatcttgaggatgtttagaatggaagttagtatgggtgtggtgatttgcagcttgattgattagtagttttgttatttacttgtttagagctttgcagcaataagacttggcagtctgtcctgttggctgttgcccaccctgaattagttgtttgattggttactgcattgaatttgtaatatgttatctgtttgtgttgttttacatattctagtgattaccagtactgtagtagcaattcttggcatatggtcttcggaaccttcactttgtaagaacgtaggaaactgggataatcagagaacatattagagctggttaaagttttatcttgagaaactattttgcaagtacattaggttgcttaagttttgctgttg

SEQ ID NO: 50076 - DNA, 1355 bp, Oryza sativa
ctctgaaaaaaagagaagacaaaaaggaaaagagggccatggtgaagaggcctccgtgggccgtggcggcccagataagagttctccttctcactgacatgtggggccaaattaacggccgttgccgcgtcgcctttctcaggctcaaagaagctcgccgccgccgccgcgacagctcgcctcgccgacgagcggcgtcacccgccactccgcatcgatccggccggcgtcggtgagatccgttccaccgggccggcgccgccgatgtgtgtggccggcggcgagacgccgggtggagatatcgccgacaggcaatgggggaacgagggttagtattctttggtggactgagcggcgagctatttattctcgatcgatcaagcagagatcctacaatgcaaatggatgctctttttctggtcactgaatctttaaatgttgcgagtcgcaactgcattctaacctgcaaaaggaggctctctgttcatcaaagtttatgtaaaataatatactccctccgattcatatcataaatcgctttgactttttcttttaaattaaacttttttaagtttgatcaaatatataaaaagtatagcaacatttctagcagaaaataaacatattatcaattattatacttaatgaaactaatttgatattgtagatgttgctaaattttctataaatttgatcaaaacttaagaagtttgattaaaaaaacaacacgatttataatatgaaacggaggctactagcatcagatgcagtttcatttcatacatctttgagttttatacaatgactagtaccactcactatattttagagttcacctcaaaacgtgcactggttcaaacttcacattcaaaaccaacatcgataatttctcttccaacaaaagaaaaacacttctccaaaaaactcttccaaaagagaaatcagacgtagttgttagtctcatcatcaaatgctgtcattccagtcatccagggtacatacacacatcatccaaatccagccattctttttaccaacttaacgtccctgtatatttaactgaacttgcttggataaaacttactccctgtatatataactgaacttgcatggacaaaacttctcaaaagatttcaccaccaccacactggtgaaaaacagttaaaacttgcagtaaaatctactccctgacagtacgtccaagcaaccaacatgctgaaatatagcacccctggcttctctgtccaactccaagtttccaacaaccaaagttgccagatcaactgtgatcagaagcatatttacctgaactggcttggacaaaacttgtcacaagattggtgaaaaaacagtgg

SEQ ID NO: 50077 - DNA, 566 bp, Oryza sativa
atactgcagagaaggtgtttgatattcttaaggtgtgtatagtatcactgcatcgcaacaaatattgaaatgccatatgaaacttcaatattgcacgcagaagaactatcattattgcacactggcaactagcaagtaataatatgctaaatagggtaaattgatttgctagccgtaattggtttaattcaacattgcacagtaacttcccaacatgtgatgcatctaagtggtttgggatttaatggagtgatgttggtctgaagtataaagtcaatacatagagtaaaatctagtttcaatgcagtttgtgttagttcacctgtatagctggatggtagtctggaatctactgtctgcttcagctgattttacactcgaaaatatacttgtttgtttcaacccagattctacctgcacatacagctctcgatctagtagatacaccttaacataggaactgatgtttcagagtacataatctgtacttatatgtagccccaaaatctaattttgtttctattcattcaagttgaccatcaacattgcagtctatatctcttatt

SEQ ID NO: 50078 - DNA, 588 bp, Oryza sativa
cttgaacaagcatctccgattctcattgaattagacataattgtatcaacacgtttatggaagaaaataaataatgtcttaaggccataggtcaattctagcaaggtttagtacataccaaaatatcatttaagaaaaatagtatgttctggaaattgcaagatgaatcacaacaaggcaatatgaaaatgaattgaccacagatacgctactttgacaaaccatttctggcagtgattgcaatgggcgtagtgatgtttagtcatcttgcacagaaaggtgggttacccaaatagataattatctggcatattgtgaaaaacatgaatacaaatcaatttttaaaatacaaaggaagcatgaaaacaggacctatgcaaaacctgtaactatgataaaaatatgtccaatgagtttggatacacaattaattgtcgcttaatttactgagtctgaaagagaatcgaaaaggtaggattcaacattattctcagagtctaagcgactatgcagtaaatgttgcacacactttgccagcaatgcatgaaacaccatacttcacatgatgatcctcttcaaagcgattac

SEQ ID NO: 50079 - DNA, 1008 bp, Oryza sativa
cgctcattcaggttgcatagattgtacttttgcttcattaaatgtatccactcacattattttattagtatatattctatatattcctgcctaaacctgcttcatggatttctttttcctacttggccttattttgttggtttaaaagcagagcagcgcacttgtcatggtctccttttttactgggggtttgatctcttttgtcagcacaggctctgattttacctcctagacattcaaaataggaactctcttcaattccagttccagatactgttcctcaagaacacaggtactaattgatgaagtatcctctaaaagatacgttgaatatagtgctttttcatgttgccgttcctattttattcattccttgctatgttgtgttctctaggtccaaattccacttaaggttgtgactctctgtgcaagtagagatgtgatttgtcaaatttggaacggcactagtaattgtcttatctcatcatgtttttctgagtgtccaaatttttaaccttttcttttccttcagaaggtaacagactttgcttgtatccaggttaatgtcaaacttcgattccctgttgtattgaattaattcatggaacctacaaatcttccacctgaagattttttgcctgcctggaattctggaaagcattagctgctcagtctctgaaagtttaagatgtggtaaggtttcagttctgttgtggataactagtgagttgtgaaggaatacatttttttcatgaaatgtagaattggataatcttccctcatggttttgcttgttttttcttggtactgatgatttagtgtgtcttgttagattgttactattgccttctagcataatggatatagcaagtatgtttagctggatagtaatgttgtgctctattaaaaacaaaggaacaatggagcggattgcccttaagtttctggtttctccacgtggtcgaggctctgattggcgactttggtgggcaaagcccttctctaata

SEQ ID NO: 50080 - DNA, 709 bp, Oryza sativa
aaaggatttctttcatgaaggtcttacctcttggtaaaattctttccaaaacttgtatgggaagaggcattccataagattttcatattattccatagggttcattcctgtgattcaaagggctttgtaggaaaaattcctataggaatgaaatcctctaaaattcctatgaatttcttttgaatcaaagggggcctgagagttgatgtgacactttgttagattcattgtactaggacgtagtactccatcggattgtctgcgagtgacaaacgctgactctcatgtgttcaacattgatcaataatatttttgtcttcttttttctattttggatgttggcagatctaactctctgtatatacatgagatctttcaattttgcatattacttttattaatgtaacgtttagtatactccatatattaatgtaatgttctaagatccttcttttgaaatcaattaggacggatgagaaacgagcgagtacgcaatacatactcgttttgttcatgacatcaagagagagtggtgaaaaatgttgaaaccatatatattatgagggcatggccaattctttttttaaaaagtgtgcaattcgtccctcgaggaaacctccccttgtttacaagtcgtctacagaaacatattttttctaaaaaatatagataaatatatgatatatcactctataaatatataaattaa

SEQ ID NO: 50081 - DNA, 1061 bp, Oryza sativa
  unsure (1)..(1061): unsure at all n locations
attaaaaagaaaatcaatataagcactggattaaaaagaaaataaaattattttctttctattagaaaatggattcaaaagaagaaaataaatataagcgctggattaagaagaaaataaaattattttctttctattagaaaatggattgaaaagaaaaaataaatataagcgctggattaaaaagaaaataaacataagcgctggataaaaacaaaataaaattattttctttctactagaaaatggattaaaaagaatatgattaataaaacagaaaatggattaaaaatagttatttctttctattagaaaatggattaaaaagaatataagcgctggattaaaaagaaaataaatataagcgctggattaaaaagaaaatcaaattattttatttctattagaaaatggaaaattaaattatcttctttctattagaaaatagattaaaaagaagaaaataaatataagcgctggattaaaatggaaaataaaattattttctttctattagaaatggattagaaagaagaaaataaatataagcgctggattaaaaagaaaataaaattcttccacaacaacgaatataatgtaagcgctggattcaaaagaaaacaaaatcattttctttctnttcnanacggcttaaaaagaatataaacgctagagagagggcttgaacctccgaccttgtggttaacagccacacgctgtaaccaactgagctacatccgctgtgtgataaatgatcgaactacttgaggtgtgtgataaataattgaactacttattatcgcacttaaacacaatcaactactctagctggtcaaatgcaattaatactcctgacagctaactaatcaaaaactgcatcactggggatacaatctatcagctaacttcacttgatcttcattgcgttaagatatgaactctctgctttggtctactacttttgcataagtggtgcattatctgattgtcatcatgactgtaagacatcaccatgtttgtaattcaattcctcgatttcatctgtaacaaacaaaaccagc

SEQ ID NO: 50082 - DNA, 603 bp, Oryza sativa
tcaccatgagttaaaatttaactcgcagattcactcgtgagttaaaatttactggaagttaaattttaactcatagtgacgtggacgaatctcgaacgtccatttctcgatccaacagtgtaggatgaaagttgcattattgcaccgaattaggtgattgcaccggatacttccccccgtcaacagatctgggcacacagaaactgtccggtgctttttattggcagtaaggtaaaatgaggattacctaagggtcgaacgggggaacatcagagtagccatcacaattcttaccctccttttttttttttgaactccaatggtttttttgccctcatttcttttcaacggaagcttgtgttttctctcatccattaaaaggatttaatggtgtcaaagacatctgtgcacttgcatatttgcccctactttgctaaggactttgtgattttgccgctattttaacatgactttgtgttttgaatgaattttcacatattcagttaaaaaaaaggagggcgagtacaagcttaacatgaagtttgccccttttgacatgaacttttacaactttaagtcctcttaatggaatgggcgcaggca

SEQ ID NO: 50083 - DNA, 591 bp, Oryza sativa
aggttggtgaagaaaattgaaatttgatgaaaaagagggatttatctttccgagttgaagaattaaaactaaaggaataagaatggtattaattatgaaaaagggagataagtttgagttgaaggatatttaagatgaaatagattctatttgtgaattaagatgcgggaagagagaaaaaaatgtagttggggaataagtagattttataggtgataattcaggtagttaaaggaagtgaaaaatggttaatttaaggggaaaggtagtactgagagtttattgttaattattgatgttagagttgttaatttagaaaatgatgataaatatttaaagggaaaagcaaagttaaaagtaactttagtaagaaatgctaagatggaaagtttacttgatgatggatttttatataaaataaatctgataaatgaatgattaatgtgttaccacttcaagtcaattgcaaattgatgctgttaagaaaatgtcacttaagagagaaagagggaaagtggtgtgtgctaaagatgaaccatcacagtacaaaagcaaggaattgagaagtttggttgaagcagagtccatggg

SEQ ID NO: 50084 - DNA, 1823 bp, Oryza sativa
taatccattttccaatagaaagaaaataattttctttttaatttttaagatgagctactataagcttatattctttttaagatcacatccaatttattttctaatagaaaataatttctttttaatccattttctaatagaaaataattttattttaattttttaagatcagctactgtaagcttatttttctttttatgatcgcatccattttattttctaatagaaaataattttcttttaaatttttaagatcagctactataagcttattctctttttaagatcacatccattttctaatagaaaataattttctttttaagatcagctactataagtttattttctttttaagatcagctaacatagatatgtattcactataaaacagaaaatactacatattttataatccattttcgaatagaaaataaaatactacatattttataatacattttctaatagaaaataattttctttttaagatcagctactagaaaataacatagatctgtattcactataaaacagaaaaatattgcatattttataatccattttccaataaaaaaatttttaaaatttttctagtcgtttatgatcaaatcaaatcgtcagcatcttttattggagtttctgaaaagttaaaagatagtttttattgtggaggcatgtttccttgagatatccatgttttcatatagatatgctgaattacgactcttgtgaatatgatggtggtagattctcgataaaatatgcattcatgtttttttctcaatatttattattaaaaaaattgtgattaatgtgtacagagtaaaatataaattgtacaagatccaagtccccaagacacatgttttttgggaatggtgggaatatatttcaagaaaacaccctatcacactaagggcttattcggattggagggtcaactcaggaaaaaatataggatttgcattcctatggatttgggtactgtagcagcattcggatcaaaggaatcacttgtaagaaaatcggaggaaatctgaaggaaaatttccttggccatccattccacatgaaaactaacaatccactgcgagctcttttttatttttcctatgcatgggaacgcggcaatcaacaaactaatcttcactcctctaacacatgaatattttaagttagtgggtaagttctttaaaaattcatatatttttttacgctctatccgaacgcatgtttatatagcattcttgtgtttttcaattctctgttttattagtacaatcttatcatattcctatgatttttctattcctatattttttcaatcatgcattccgaataagccctaagttaatttgtcttcttgatgtgtatttctatttcatgtgtttttgggtttgaatgttttaaccatgtagctttgcctttactgttcgtatacttcatgtaaatcaaaattgtgccttgggcatgtgtaaacgtcactcctatctctgatctagttattttccaatggaagaatattgaagataaaacgagaatctaagaaacacccccaataagtcatctataatttttatacttgctttaatgaatgcagtattgtgtttgttcgaatgaattgtatctaaatactacatacttgtaatatacagtattcagtaaattgcttgttaatatgatcttctaaatagcagtacattgaaatttttgctgttagctggagtagctcagttggttagagcgtgtggctgttaaccacaaggtcggaggtttaagccctccctctaacgattttatttttatttacactatacttt

SEQ ID NO: 50085 - DNA, 3089 bp, Oryza sativa
ggggagctggagctcgcttccgccggcggattgggtggcggcgggggcgacgagcttgttgatcctgaccagctcacctacatcgtaagggatgctctcccattggtgtttttgttttttaattattgttgttattacttttttttttgagcgtgtgcggattggatggttgatgagatggtggtggtaccgtggtgttggtcgcctgcttgtttttgcgcatcagcggcaatgctgtcatctagattgttgtggcttcttgaaattttgagtttgatttttttctctgtttgtgcacgtactttcgattgcaatgttgtcatctagactgctgcttcgtgcaatttcggggtcggtttttatctgtttctgcacgtagttttggttttggttgataaaggggattactgatgagtggtgtggtccgttcggtaatatgagctgatcatcaagtcatcgattttcgcgaatgggttttgctattttccagtaaattgccgccctccatagtgagaatgtgttagcatcggctgatatattggaaattgtctctggagtattagcttggagctgacatgtgagtgtccatctagttggtgaatttcctctctatcatgtgtatcttttctggtacggtggtacgaccttctggtgagaaccaaagttttcatagcacagtacttccgtgctactctgatggattttggtaagagcagctgtaacagcggaatcagcacataattttgactgcttgttatcttgtgactggcagcataatgttttcaagattgatttatatagccatgtattggttaatttgcttgtgacaatttgcaaggttatttatctattgcatacatagaatgaagcgattaacttgtgagttgatgcgaacgttatctaggccattgacttcttttatttttccttcaaattcatgcttctaaacaatctattaaaatcctgcctgtcatgccaaagcatttgtcacctataagctcgataagttacttcaataagcttgtgggcatctcacctataagctcaccaaaccttcccataaccaatttgttcgtcaggtaaaactatattataagctctagaaaatataatagataaacaaaaggaattccacatatatgccaagaaaaacgtttagcattatcttttgttgcattagttggcagcccatgcatccacattcattcatgcttcacaaaagttttagtaactttgtttctcacttgatctttatagtatttgaattgaaaaaccttaagcaacatgaatttctgcacatttggatgacttatatgcgatagttgcatttgactaaaaaatttcttatattctatagtcctaactttattattattaatttattgattgttattttgttcaacatgctgcacagttcaagaattgatagtctgtacagacacaagaacactggtttcggttagaaaagtatgctgactggatttttaggatgctgtgaaatctatttgttcactcctagataaaatcatatataatccagtttatattcccttttatctcttttggggagtttcaagttttctgttattttcttgatcaccatagggtttttaactgtttatctttaaacgatataggaatttccagctttccttgtttaccatgattatttggaggggggtctagtattatgatgtatgaaggtgattatattgactgatagtggattctctgtcatgatgaatgcagtattatgttgtattttggatttttaattggatgcttaaaacttgattcagcattggaagctcttataatgtaattgtcaatttgttttgcggcttgatttgcctttgtctgtgttgtaacttgattcaccagtggttcagaaggacaaatactctactccatatagctgatgatggtttgcattctgtgtgcaagtttaattatcagtgatgctacttttggcatagggaatacgtaactcgtatagtttttgttggatccagctgtgggattttatctctgttatgtgatgcttctggacttcacgggtcggacctactgtacctttttttgtttggatggtgaggaattatagggaatgagttattctttctgcagtatggctgctgctaaatgctaatgaactccagatgttagatcttcaaccttctgtttccatatttattcccaaagaggctttctctttcacagatggtccttatgttctgtacagtcttaaagaagtagttttctctttgtgaatgatcagcatgaaataaagtatgatgtatgttgtacaggatgaaaaacttcaaaatatcctgggtcatttccagaaggagtttgaaggtggagtatctgctgagaacttgggtaaggggactaaagctgtgtcacatttgctccgtggagctacagttgtattgaactactgatgtatgtgcaaaatcattaacactgcatagggtcacaatatgggggttatggttcattcttgcctacataccagcgctctcctcctgccttatctcaatctggaagccctgcagttctacccaaccatggcagtgcctcgagatcaccatatataccactggaggtatactgccgcaaacttcaccatgcgttgttgtcttcttagtattactgcctaatgtttgcaccctgttgtgatatacttccagagtgtacagaaaaaccattttgtcaagcaagctatagatggaaggaggaaaaacaattactgccaaagaacatccagtgagaatgatagtaatcactctcaacagttgttgaacagtggtcctgagcagaagacagcaaaaatacgtatcaaggtgaacaataaatgcctagaaagaaataatgctgctatctacagtggcctgggcctcgacatttctccttcctcatctatagatgacagtccacaatggagcatcgaggctcctgaatcaaaactttttcctgatgaatctgcagataccatttttcaggttaagtttacaccatcaattcaatttatcttggcaaaacctctggtggttgatttttgataaataatccatgggctgcaggaa

SEQ ID NO: 50086 - DNA, 595 bp, Oryza sativa
tgctcaagtataagtcataccttaaagtttctttaataataaaacaagtcacacaaaaataaatagcatttatataatttgtttgaatatgactaatggttaaacgtcatatcaaaagtcaacatcttctgttagaatacagagggagtatatgtccataacctatgctaccttacccgcttatgaatgaatatttgcgctacacacaatcatagtcttaaagctatttaatttgcctttgcgcatgctatttgaaaaaaaaatgatgtacctctttttaatcgatcacagtaatagtccgggtttacccgttctttaggctccacttacatcatgagcaagctaaaaatcgtgatcaagatattaaacctaaaatgaccttgatgtcacctagaggggtggtccatggagcgactcctcggaccagcgaggagtggagacccctccccgagtttgaagattcagccagggggttagcagtgcaagacgatagaaaaagccaaacagagaaaaggtttgtggggcttgatctccccgccaagcaaaagtcaccagagtttatacaggttcaagccacccggaggtgtaacaccct

SEQ ID NO: 50087 - DNA, 566 bp, Oryza sativa
tccaaaatacatgtgtgtatgacaggtgagatcagacattaattatatagtacatttttatagataactattgtatgaattgactttagaagatttggagccaccagttgaatatactactcccttcttcccaaattaatcatgtaagaataggtacaacagcaaattattagccagctataaacatattttaatgagataaaagatgagagagaagagcagcaggctatagatctgtagccagctataacacggactccaagacgcaatggatgtatgacatgtgagcccatatattaatagtataataagcaactattgtatgaattggctattagatcggctatagatgaattggagctagtagtgggctatactagtaaacttgctctaatagaatttaaaatttttcaaattggtcattatataactgcatggaccggatttcatcggaatacaattaatacagtatgggagaatatgtgtatgctagggtgtaattggcaggaggttttaatcgagtatgggagaatgtgtgtatggtgtcttgattgatgtgatttaaa

SEQ ID NO: 50088 - DNA, 574 bp, Oryza sativa
ccccccgcacagtacaaaatcgccctagcggagggcggcaagggggccgcctgcaaatttcgttgacggccgtcgcccgagagcgaacggtcgtctgccacgtcactttcgccgccctctgggatagcgatttttaaaaatcgccctcccagaggacggtaggcgaccacttctgtcaattttcaaaatgaaaaattatttttgtaaaacttttaataaaaaaattaaaaataaaaaaaattccaaatcagcccatggaatgagaacggaaattctcggcccataaaaatatttaggctggagacgtgcggcccactatagttgatgtggttggtttgctcactgacatgcgggcgccttcatcatgtgggacccacttgtctgtggctcatgctcgcgtcccccatcacaactcggtcactggtgccacggctgcttctgcttgggttccgggccatctcgatctcgccggagtcgcgcgccgccgtgcggaggtcgtccgaagcggaagcggagcgcgctcctccggtcaccttgggtgcgtgctctctgtgctcctaatccttcttattcc

SEQ ID NO: 50089 - DNA, 726 bp, Oryza sativa
attagcgaacaacagatgcattatgtagttggagattgctcttgacatcactctgaaagaagggccaatgggtggaccaaaagattcatgatacttgtgaaagcagaagtccgtagccacatgccatataggacaatctcatcgaatggtttctctaagctccagcctagaagccaggtgcattttgctcactcaagtgcccactgtcccatgttgtcattgaaactcctgtagctctcggcgtttctatgtattttgtccatccatctttcacataattgtgaaccaaatttgtaatatcggtggacatatcgcatagattcatgcaccagtattggtctagcaaacccttgcattgtaagcatcctgcgatgcttatcaaccatgcgtgccttttgtttcgggtgaagaatcctacgaggctttgttgtgccatagtgttaggcaagacatcgagatatttccatactacagccatggaaatgatctctagtaaaagggtgccatacgccattagaaatgtcacaatgacatcattatggctataggcttgtttatggctgtgtggaggagaccaacggctgggatcaccagtagtatagctagcattcatgttgatacccaacaatagcggtttgcgtcaggttgttcgctatcaatcttatttctggtgtatagaatatcaaagatgttggaaagcccactatttattgttttacaaacttg

SEQ ID NO: 50090 - DNA, 842 bp, Oryza sativa
cacgggggggcctcacgctatcattggtccggtttcttaccatcaatctatctatctattatctattctattatatactaaaaagccattaaatttcctacaaacgctctcatgccgccacatggtgctctaaaaagctctcaagctaccacaaggcgctataataaaatagaaaaaaacttaaaatttctgagaaaaaagaaaaaaaaatctatccctccaaattcttaaaaaagtgggggatccattaatttacacaattggattagatatgttataaataagaatctatcccttcaaatttaccgaggaatactttccataaaaaaattgactagaaaaggctgagaaggcattggtacgtacgaattaacaaccacaaccgagaaaagaagaaatgatattcagcaaaaaaaaaatactgtatacgtacgtactactggaaaaaaattttaaaaaaaaacatcgctttttttaaactggattttcacttcctttgtatttttttatgacagccaacgttaaatatttagtgaaactaccgaaagaaaacaacgctctttaatctggattttctattatacttcctttgtatttttttattggtttttatatattgatgaccaatgtcatatatttagtgaaggtggtagtataaaaaatatatatcacttaacaaacatgcacagccaaaactagatctataatataatataaaatatcaaatacacgtatcatttcacactattattgttgagtatagatagcatttatttgcatcaatgggcctatatattgatagttcaagatgaaataatgagtaattaaaatattcaggacat

SEQ ID NO: 50091 - DNA, 616 bp, Oryza sativa
  unsure (1)..(616): unsure at all n locations
aagcgcatatatggccaaggcgtcgctagcgaggtacgagaaaagaatgaaaaacctatagcagtgcggaatacggaagaacttgcgcatccgccaaaaattacaagaaagtactgtacgccgaggctgcccaatacaagaatgcgcagctgccactcctcccaccatttcacgccgcttgacaaatccatcgtctacgatcgaatnacagtgggctagctcccgtctctctagctctgtccccttttcatctacgtgatgttgcctttacatagtcagtcaggcacacacatatatatctaatgggacttatggaggagtaattttcaaaacttcgcgtcaactactgcttcgatgcttccttacttgcatggtcctagagaaatattcacgcactaatcaataatctcgatctccattattaactgtgtgattgatcgatcctggagcttttaagtgtagagtataagaatcagttttacttgtaaaacatgttacgtagatctcgaggtcaactacgatcgattaattctataaaattacaatatatatttagttcattaagttcctgaacaacattgaattcactaggacatgctcagccaatttcagtttt

SEQ ID NO: 50092 - DNA, 925 bp, Oryza sativa
  unsure (1)..(925): unsure at all n locations
cggctcaacggatgcagcaggtggcggtgcgacgggtgctgcaccgcagcaccggtggcgctcgtagtctcggcgtcattgcttagtgggattagtgaacactgaacagtaattagtatttttagttgttgggttgttaagcatggtttactggttgatggtggtcattgtactagtaggccttttggccactagtgctttattgggctaggcatgttatccgggtattatccggatatttaaccgggtaatacccgtatttttaccggataatctgtatccgtcggataccgtcctcccgaacccgatctcatatccgatagaaaatacccgtattcgaacccgctacccggagaaacttccgggtacccgaaatttttacccgaaattgtcccgaaataatacggctgggcgggcgggcgggaaatacccgccccgttttcacccctactcagcagcacaacgtgccgtncacccacaccgnatnnctctcctctcctggtgnccgcaccgtncttcttcgcccccgtngaattgnattccagcgagcgtgcttacgcctgcgccccgtggcctccgcgccgggcgatcccgcttgcagtgccgcaggtgcccttctgccccctggtcgccatcgcatgcctcttctgtttccagtggaactttctctcccgcgtggcttcttctcccgtgcctgcttgcctcttcgagtctgctgaggggacagggatgcgatgcagtgcagatggttgatcgttcgattcaaatccaccggccatgagaaaatgaggtgacgtgacagcatcaggaagcagagaattcctagtagtggggatgatttgtataggtatataggattacataggctaaatgtagagtagaactaaatttttgttgttaattaataggttaaggttaaggtgtc

SEQ ID NO: 50093 - DNA, 617 bp, Oryza sativa
ggcaacttcgtccttgtcagtaagcatgcctcccggactattaaattttgtgtaaaaattttctatacaaaagctttttttaacaaaaatcaaataaatctatttttttaggtttacagtaaaacaatactcgtcaatcatgcgttaatagtttatctcatttcgcgtgtcgtcaaaaatcccaaacgaactcagcctaggtttattttggagttgggttttttctagcttcgggaatagggatgataattttgccaatggatccgggtatctgcggatacccagcccaatgggtatagatgtgggtgtgattttttacccgtgggcacgctcacccaagacccgaagatgacatcttaggcaacaaccaggtctcattttttacccatagataacccatacctaaccaaatacatatgtattagcttatttcgatcatctcttgattcttatacccctttctcttagtccatttatgatgctaagtttgttactgatatgatacatatgtattagcttatttcgatccatctcttgattcttacgcccctttctcttagtctatttgtgatgctaacttcaacatcgcctatatatattcgttcatgaacaatgtt

SEQ ID NO: 50094 - DNA, 2954 bp, Oryza sativa
cccgttacggaccacacgcacgaaatgcatgcctctttttcctccgctcctccgtcgtacgaaacggaggttaacgaagcgaacggtggtttccacgtgagaaaagggggagcttctccgccaagcggttgaacggcgcgtggcgttgggtgacccggcgacacgcgggattttacgcctttttgtccgaataatatattttttttcaacggcttttgcgtacagagggatatgggaggggggattcagaggggcgggcattgggagctttcccggaatggcgattggaaagtagaataatcattaaggtggcagttgcaatttgttaagtacagctcaaaaatatactccctctcgttccaaaataattgtattttttgattgaagattcatccctaaataattatcactctagagcactaattgcccccataaatcatagtctttttttttctcaatagatataagtgtcacaattattttttgatggaggtagtacagtatttttttaatttaaattaaaagttattatattatggtacgaaggtgtatattacgtgaggatagtgcacagaagaacattgggtataatggcgtgcacatgttgagtatacttaatctttagccagttgcaaattattaggtcttttggtattaaatatttgaatgatcaagtgcgtctacagtttatttataatttttcgctgctaccacggagcttgacaataattattgcgtacaaaatcccttttcatgttcaactgccaccaaaatttgtttataaactttttatgctaaccagggagctatgagtcatatttatttcatatggcatccttgggggaaaggtgtcttaaaaaaatcagggaaaaagatgtttttggcccagtttagatcctccaaaatggtaaaagttttaccattttgtagcattttttgttattttggatctaaacactagtagcaaaagttgtcaatttggtatttggcatttgctagtccatagtagcaaattatgccaaaaagtgctttgggaccactccatctctctttctctctcacactttagtgctagaatggcaaaacttttacatacatctaaacaccaactagtacttttgcaatgcaaaaacttttgccaccaaaacttttgccatttgtcatttgtcattccaaatggatctaaacaggccttttatttatttattgctgtttctagtaaattatcttctagaattaccagccaaaattgtcggctagataactgcggctttgtgttcgtgtcgccctggcagagtacaagaagaccagtgcatgtcgcgtacgtaggccttttgggcccatacaccccatgtaacggcccactcactcagccagccttaatcatggcccgcaccacccgcgaccccgttccggcccaactaaaatgggctacacgtatgccgcaatccagttccgatcagaccaaaatggacctagcgtcctcaccagcgtgggccgtggtgggctaccaacttctcctcttctcatttttcacgcacacgttttctcattctttcaagttggttcaagaaaatcaatttcgatcttttcttagaaagtttttgttagctgatagaagcactgcgcactcaattaacggaatcatgtgttaattcatcgatctgttttacgtgtcaagagggaaaggttgactttaaaaaaaaaaacacaacctcctaactagagcgaaaagtagggcttgaagatgtttttctactacacgtcacgcgtatggttccagatccaggactatacgacaacacctgctcatcacttcatcagctcatggtacggaggacttcctccatctctaaatatttaacatcgttaatatttttaaacatatttaaccgtttgtcttattcaaaaacttttgtaaaatatataaaactatatgtatacataaaaacatatttaacaataaatcaaatgataataaaataattattaattaattaattttttaaataagatgaacggtcaagtatatttaaaaaatttacggcgtcaaatatttaggaacggaaagaatagttattagcccaacagtgttttcgtcatcatgcgtaaaggtgcaatatatcgtccaagactgatcaaggctagctaatggctagttgcggagtaatcaccgagtaattagtgtagaaaggacaacgagtagcctgcaaattaaatccgaatctatcgatggatcaggttgcgatccgaatgatatctgacaagacatcgatcaccgtatgtgtgctcgtcctgaagagagaaaaaacacgacatgacccaatcgatggagcctggctagctttgacattgtgcaactctatataagcatagcaactggggactggacacttctgccacttgagctgcgtggagttgccctcacaacaaatcactgaaatcaccatcaacaagatatctaggggccgtttggttgctatcttcaatttacgatgtctaaggttttacaatcgtttagttcattgtcacatctgtgactcgccacacttttcaaccatatggtcccacgtatcattgacccaattttttaagtaagcttgtctaaggtgttgctaagaatttatgagccacaacttttgtgacaagccacaacttatcttaattgtggtttggtaaagatagccacaaaccaaataaccccctagagcatggtttttcttgcgatcctgtagtggctatggttttggattctgcgaggcatctgttgcactacgtcgatgacaacattgggttttcttatttaaaatatggaatcgcctaagtttcatatgacagaaattttatggtagaaagaaatccaccattagatccactccacgattcatgctacattccttcttcagcttccctgaccgccaatgacccgatgaattaaggcttaccattctggg

SEQ ID NO: 50095 - DNA, 3484 bp, Oryza sativa
ttttgccctttactgaaaaaaaattaatgaaaaacaattaccattttaccctcccaccttccatacctggcccacccttttaataccttttttcaggtaccttctctttctgtccgttagatcattgcagatcaatggtcctaattaatttcaagtattgaagaagttctctctggataaaggatacgtattaggagttgcgtgtttaaatccatttgatcacctattgtttcagtaatcacaacacagaatcaatcactcgatcaaaaacatttcttacttgggttctgtacttctgttgttactccagttggcaattaggcagcaattctgtgttagctggttaggctggcatgtgtacaatcatattcagataaggaaaaaaaatatatcagagcgggttaggtaagcgtctgtacaatattatgtgcacgcgttcagggtgctctgtttataatccctgatccagagtggttacatttccttcattgacatggtaatttcttcatggtgatacactgatacgacaaaataaacatgtgaaacccgtttgcttgttcatggccacatttgcgggttaccttagttttggtgttcaaattgaaaacccatcatactcggaagagtcaaaatacgtcaatcataaaagggtaaatctatctatctattatattattaaaacagccttgaaaggaggctccacgttcattgtgggggctagaaattccaacattaattagagaaaaagaaaataagagtccaagtagaaatacaactcaaaaattgctgaaattcagaattaaaaataagaaatattgaaagaagtctccatataagaaatcaatacgagattaatcaaaattcgaaataaaaataaaataaaatccgaaattagaaaataaaaggagagtccaagtaggaatataatttaaaaataactgaaactcgtaattaaaaataaggaatattgagataagggtccatataagaacccaatacgagattagttaatatacagaataaaaatataaataaaatccgaaattagcaaaaagaaaagaagagttcaagtaggaatacaatttaaaaacaactgaaattcggaattaaaaataagcaatattgaaagaaaaatccatataagaacccaatacgagattaattaaaattcaaaataaaataataaaataatatccaaaatgaaaaaaattaaaagagttaagtagtaatacaattttgaaaaaactgaaattcaaaaaataaaaattaaaaatattaaaagaacactatacggtattaattacaatgaaaaaaaataaattcataaattataaaaataaaaaaattcaattaggaatacaatttataaataataaaaaatgatgataaaaataaatactattaaaaaaagaccatctaaaacacatgacgagataaattaagtaaaaggcctataaaaaagtagagtgctggcggttgatacgacatataaaagctgttagtaaaacatcaaatagaattctaatgatgattaaaaggagggatgacaagcaggcagtgaagcaaacgagtaaggcggttgccgggacttctagaaagtaagaaaaacaaaccccattgataatcatattcgatttttaaaatctcaatgacaataaaaaggagaagcagcgtgcggggtgtataggagtacagttgcagagccgccgacggttggcaggacttctagaaaataaaaaaatgaattccaacgatagttatgttcgatttttagaatcccaatgataataaagaataggcagcggataggccgtagaggagtatagtagcatcgtttgacgggacttctaaaaaatataaaaaaaagaaacccaacgagacaataaactctaaaaactacaagatccaatttttaaaggttcagaacttctaaaaagtaaaaaaaaattaatgataatcatgtttgattttaaaatctcaatgacaatgaagaaggaaggcagcggtcaggccataaagaagtataatggcaaagccgctgacggtttggcgggacttcatttgtaaaaaaataattatgttcgatttgtaaaatcccaatgacaataaagagaaaagacagtggatgggtcatagaggaatataatggcagcatttgaggggacttctagaaattataaaaataaaacccaacgagataataaacttaaaaagctataagaaacattttttaaagattttaaggagaatgaatagaaatagtggtagaccgagcaaacaaataaagaagaatatgacagaaatatagggtagcagctggtgtgacttttaaaattatataactagaaatacgaggatagctatttaataaatcttaagtaaaatcatactaaaaaatatttgattttgtttaggtgctagccgcacaattgcgcgggccacccaggtagttgttttgatcttagctgcaaaaagagatgaagttcaggttgctctgtactgcatggacatgactcattgtaatgtaggggaattgtggatatagcgagatttattaggtttgtatcacagtatgaaaagcagaaaactacttacacgtgcttgagtagtattcgaagatactcataggggtagagtttgcgtgtgtgtgttcataggggtgagtgtgcatgcgttgtgagtgtctgtgttgtattgtgtaattcttaaaaaaaaagttttactcaagctcttttatacctttgaattttgtttcataggttttcacatttatccctatatacccacatggccacgtttcattagatatccgttatgtttctctaaaataattatattacccctctctcatatatactaatgtgctacttaaaaaatatcaatgttattttttaaaaaaatataataaatcaatagggcataattattttacaccaaatttgaaaaacaaaatttaaattttgaaacaaatatttcaaaagatggttacagccataaacgagtttcactgtgaatgaaaaccccttttttttgttttgggtttaaattttggtgaaaatgttgtatgagtttcatcaaatttattctaaaatttatttaaaatgtatttttggttaatttgtggtcatataataatggaaaattttgcttccgacactcaaattacgtaatttgttggtgaacatcacaaaaaacttactacaggtgaaggacaccacaaccgttaccatattatttcatacctaatgggagacagtgcgttgaaatgacaaatttgtcctcgaagcagcacatattactcggcttgatttggaccaaaccaggccatatctcccttagaacatccccaacagctcatccaaatttaatccttcatatgcctatatagatggccatccaaaaagattcctcctctatatccctactcactccaacagatcatccatattacaccctccctatgttttaataatattttccaacc

SEQ ID NO: 50096 - DNA, 941 bp, Oryza sativa
gaaaaagaaaagaaaagaaaggattttcctgggatttaaaatgcactttggtgatttttaattggttaaaattatttccaaggctctgaaaattccactaaaaatcctgttaatatattgtgacatgtagaatccaagaaaaattccacatgccgattctgattattatttgcatttattaattagagaattagctctaggttaattaagataatttcttcggacgatttatttagccaatttttaaagcaagcaaaaggggggaaacttcagggcgtgacaagcgtcatatatatcgacttgtacgcgcactcgcctccggtttttgccccctttttgtggcgatgccgacgccgtggccggcacgaggaccactcagaaattctggggggtgggccgaggattccaaggttctcgcaactgaaggtacccaccacgctggtgcgcacacagcgataaaaaactactagtattccacttaatcatgtttctttccaaacatggaaggatatattaaagatctttccaataatatgcaatagaaaatctcacctatatatatatatattcttttctttttaattattggatggattgattttaagattcacttaagcacactaatgccaaactcctcttcttctgttccccctggctgccattcctctttttgtttgattgactcttcctctatccgatctcccgctgccatcgtcccaatacgtagccgcctgatcttgctggttggtaggaagatatcaacgatgtcagtgagaccccgttgggccagcctcctcatctgcttatcctcttcgccaagctagcataacgagtgttcccgtcccaccgtctttcctgtctccggtgactctctgtcattgtatttgtcatcgtcagccgctgtttcctaaccaaaagttccactttacctccaccatcct

SEQ ID NO: 50097 - DNA, 895 bp, Oryza sativa
accggcgaaccgtacctgcaggtgcagaccaacctctacgtacattatattgacggcatcggcaaccgggagcaagaccggttcgaccccaccgcccaccggcgacttctgcacctctggtacggtcgtcttcctcatcggcgtctacgagaacaagaacgacactgcgcctcgatcttgatcttatcgtgcgcgcgtcgatcgagttccatacccagacacattaactaccacgccggtcggatctggcggccccgacgccttgtaactcactatacccatgcaagatcaaactcgactcaaaccgactggcaccaaaacaaaaatactctgccttgtgaacagcccccacaccaccatgaagctccacatgggggcatggcgctacccatatatacacactgcacgcgccctggcatcctcggttggtgaggacagggaatagaggcaagcgaggagagaggaatatccacgctgatttaccacgggttgaacgaaactggcaaccatattatcttgagatgaaagtagatatctctttacaagtccaaggacggtcatatattcacaaatgctactgggcgggcgagcgatcgattctccacccccccccccctctggaattcgttattagcaccgcataacttccctattgtaataaaattatgtatctaaagcttataccacctaggttgacacatctaaagtttgagaccaaaagtttataagtcaaaagtttatatatccgattcaaatttgaatttgaattcaaatatttttcatatatagtatttctatacatctaagggttatacacctaaagtttatatatccaaagtttataagtcaaaagtttacatagccgatttcaaatttgaatttgaattcaaatttg

SEQ ID NO: 50098 - DNA, 503 bp, Oryza sativa
acaaatttatgccatcactttcacgataaatttgattcactcattattgtatgaattgtttgataattcatttcttcttaatggtcaccctagtaatatttctggcaacgaaaataatcatcttcttctcaatatattcctagaactcatcaaatcttatgaaaaataatttcttaacaaatacctcctactaatgaaatggtttaagattttacatcgcacaattacgaaactgaatctatataaaatcgatgaaattaaatgaattttcaattttattacttatttcttctcattattttacgacccgagtgtgatgccttgtgtgcgtgtagcatttcctggcttgcatttataccctggtgcaacccaaggctgcttggtgcttgccgcgccgtctcgcctgcgcccgccggaaagtgtcggtagcccaacggcgccgtcggcgccatcccgccaatatggtgttacagtgcacagtttcctaactcccaaaatcgatt

SEQ ID NO: 50099 - DNA, 599 bp, Oryza sativa
attttacccttactaaactaataaggtggtactaaacatattcacacaccttcatgagctatactgaccttatcctaagggcaagtgttatggtagatgtgactaccacatctaaatttatccacatcatttactcataaattaagaggcaatctatacactatgtcacctctagtacacaaataccaatgtctcttatactctcacacccctcttaaaatttgtgtggaggttgcctcttcatttaggggtggtttaccatttctctcctcacttatctcctctacctcatcactcaatccaatatggcacatttaggggcagcatatgaaacattataatacttgccctaattggccaggctatcacactggaccgcaccagaaacttcatcaaaaaggtagagaggaacaagcgctagaagagctacccctactgccatattatttgatctctctctaggcgtggaaccctgccctttttttccccatttaaacgatgattttttgtgcgtccaaaggttggggaacgctgattttttgcacgatttttgcatggtaccgtatcaatgtagaagcgttgatttttttttctcacgg

SEQ ID NO: 50100 - DNA, 1419 bp, Oryza sativa
  unsure (1)..(1419): unsure at all n locations
aggaatatatattttcccagctgtagaccctgaagctcgccactggatgtgttcgggtattgattaatactccctccgtattttaatgtatgacgctgttgacttttcgatcaacgtttgaccattctttttatttaaaatttttgtgtaaatataaaagtacttatatcatacttaaagaatatttaatgataaatcaagtcacattaaaataaataataattatataaattttttgaataagacgaatgattaaacgttggataaaaaatcaacagcgtcatacattaaaatatggaggtagtatataccattggagaaagtacatactcaagcgtatggtcaactgatccttcctcttatcgataagcggccaagttgccccaaccgtacatgataggacttgaattgaatgaggtttttcattttgctaattgtaaatttgtatatgattaaaatgtttgctagtgaagcatataagttgcatgcatggggtctgcaattaaccatatgttataactttacctactttgatttcaattctgatatccaaaatattacacacgtgtagatgggaagtgacgatcccaaagaaggagcaaggtgggcttgagcccctcctactgttggataaacccactgtatattctttacacacttcagttttgtaaatagaatgtttgcaagatggaagaaaaagataaagaagtaaaaaaaaaccattatttttctattctttntttctaaacagatactttcatatatttatcttttttatatttttcttatatatagttcgcccaccacatatatattatgtttgcattggcacctcctaaaaattaatcatattgtgttcactactgcatgtggatatacttttaatagttatttagtgagatcaaggatttgttcctttggtgttgtcttttttcaacgtgtgttagggatcgctccatggatgtgtgcacgccttaacagggtttgtatacgtgtatatgtcttacacacttacgtgtaattgaaagaagaataagaaatgttgttgtggtgtgtcctgtgcaataatcgaaacaacaagcgttgagtaacaacgacaacacggcgtcgagtacattgttgcttttgataaaattaagaggcaaaaccaggtgctgcaatagtcaaattaatacattcgacaataatttgctgaccgtacgttcgtacttgatacgtatagtaaatttgtttgccaggaatggtgctgcagagcacaacatgtcagcatgtatatatataacgtttttgaatactaagtttttgttgttttgtccgaaataagcaaccatagtgagaaaaataaaaataaataagaacatgtatcctctcacacattggtgaacgattattagctgacagaattaagacgctatatct

SEQ ID NO: 50101 - DNA, 571 bp, Oryza sativa
tatcttactacgatccaacatataattaattagctactcgaatggtcctttttctctacctttgccgtagtttagtgcttcgtcatctacattggtttgctctataagcagcgtggagccaccatccaccatccgggctcactgtcaaatacactgttaaaattttattttatttgaaagaattaaagttaaaaatattatagcaaatattaggtatatttgagttttcctgtgcttggaaagttttctaggtccaccactatctacaagggcatcctcaatgtttgtggtgtagtgtaaccttaaggtgggccttatgaatagtgagccattgttatagccatacccataatgctatggttagaatttagccacaagatggcccacatagaatggaaaaataattggttcatctcttgttcatgaagtgaatgagagagaaaatattttctttttgcttatgggagaacttaagcataagctgcatcctaagctaatgctactttccacaatgtatatggctcactttacaagtgcaatcattgccttaaggtcacctttttcatacatt

SEQ ID NO: 50102 - DNA, 729 bp, Oryza sativa
  unsure (1)..(729): unsure at all n locations
tcaccatcaataaaaatcaatgcgtaaactagtcctttacattttggaactaggctctattgctaaatcctttcaatctaaactactgaataatcacacaaataagtatcttctattttactttgaaaaaagatgagaaatcataaactaaatttgtaatcatgtttcttgctaatgtttttttagaagtaacattgtaagtacagccatacaacaacaggaatgagaggagggggtgtggggatggttcggatagggggtngctgngcctctgccctcctcctccatcgctgctcgccgcggccaggcttgggagcagcggatatgccgccgacggcgctcccgggcctagggcggccagatcacgtggcggcggtccccaggtggctcggagatggcgtgcggctgcgtcgacggcttgcagcggcggccccggggtggctaggcgacggcgtgccacagcgtcgacggcttgcgcagcgccagccttctccgccgcggcaggcctagtacggctcggtggcagcggtgcagcgacgacggcagaggcgtcagctgcgtcattcgtgagcctgagttcttgagcaccgaggtaatggtcagcctgctcccctttgatcgggtctcatccttcgcgagcctaagatcttgagcatagaggaatgaacagcagcagtacttggtttggctggatcgagagcagatcttggaattgcatgatttgtagag

SEQ ID NO: 50103 - DNA, 576 bp, Oryza sativa
ttgagccagataagggaaacagcagcatcattctcctagattgggttgtggaacattggcgtaatgatctagtcactaaggcagcagacatgaggattctaaataggtgtagtcttgactaggtttccctagtgttaaaactcgggcttctatctcacatggtcatacccacttcctaatgcaaggttacccatgcaacaggtcatgtagtaccttgacggaaacatgctccatacccccaaacttgttaccggcataccttagctcaaacatgttggagcggatgtacatcactgagttggacaataatataatgtaatatgtgtcatcgacaagtttaattggatatcatttatgatttctccagacgaaggtgaaatacatgttgtgttgaaatatttgtgttagactcggttgtactcgtctctaatgggttctgttgttatggtattcatcacaagtaagtgtatatccttgtaaccagtactttgagaaagtttgcgttgttttccaataagtttatatttatttttgaaaatttccaataagttcggataaagcaagtaaaggacggta

SEQ ID NO: 50104 - DNA, 918 bp, Oryza sativa
tttaataagtcttctggaatacttccgatgcacacgcgaacctttgcaacggcggaaacgacaagctaacacgcaaaacaaagaaaaagactaataaaaaccaaataaacagtacatataaagtaaacaaacatgtagatcataattttagatgaatttagagacttaaacggcatcattccgatttcatatgaattagttatgaattttacaagatttaattccaattaaacctattaaagaaaagactattccaaattaattaaacaatttacaaatgatttataactgagggaaaagattaaaacaacctccagaaaatattagattatatttggtagatgacatatagtaaaatgaataatatgccattgaaaagagaggaaaggatttatatggctgagattaatcttgaccaagtcgaccaagatcggatggcttagattgatctggcaagcgagcctcacgagatatcgactcaacgagtcaattctacgtgacacgggaccacccaaaagatcaactgaaactggcgaacggaaccagcggctctgaacggctctaacctaaaggacgactcaacacggacgaacgaatgaagcacggggaacacctcattcgaacgaacgagtgaacgactcaacaatggctatggctaaaccggtgggctagaaacgattcacggtaaagccccggtacgacaaacgataggccggtaggaacctagggatgcacctacggctttacaactgggctaccgggctacggctaaagcggcacacgactgcgacacggcacagcagcgacggcaaacggtgactacggtagcgggacggcagcgacttggcacgctcgagcagcagcagcacggctgtagcagggagtggcacatcgatggctaggcggctagcgcagcga

SEQ ID NO: 50105 - DNA, 538 bp, Oryza sativa
ggccggccggaggtcgtcggcgatggaggagagagagagcgacggcgcgagctcgattccggcgaggagaaggcgcggcaaagggtagaaacgggcgaaggaggtgcagggtgggtttaaatagggttggaagggggaggaagtaaaccggccgggaggtcctgccgccatcaatggcgccggcaagatttgcgggagcaaatctgcccgtttgaatgcgggagagagagggaaaaatggggggaaagggagaggggttcacggggaatattttcccccactttattgcatgcggggacggcgggagccggcgggattcgcggtggccgcggcgcttggcgcgggcggggcggcgggagcggcgggaggacggggatgacaggtgggccccacccgttagcgagggtggcgggcgggcccgcccgtcagcggtgcgcgcgcggggaggggctgagtgggccgcgggggaacaggagagagggggagggaagtgggctgaatgcggcccaagagagggaagggggatttttagggtttt

SEQ ID NO: 50106 - DNA, 672 bp, Oryza sativa
gaaggtcgcgtcatttaaagtcgggctggcgagaccgtacttctttctgaatcagttaccgtactttccacccgtctccgaaggtgatggagtgggcgtctttcgctccttcctccacacatctttggttttggtgcggatgcgtccttcttctgagccgcttgctctagtttcttggccagtatgggtggttctaccggcatcttccaatagcggttgttaggcatagttgtttccttctccatgaaattgtgcataaatttcaccaggctgtccattttgggtggctccacttcgacctcttggatattctgtgggttcggcccatactttattctgaccatggagtattgttccgtcctcggttgaaactcaaacttctcttccttgccgttgacgtggaacgggcgcccccaaggatgagcggcgtctcttttcccgtgtccatgtccagcaccacgaagtcaaccgggataaagaaatcccgtgtcttgactgacacatcctccgctatccctgccggtaacggactgacgaatcagccagttgaaggcgcatcggtgttggtgccaacactgtgaagttgagtctatcgaagacgtctttcggcatgatgctgacactggctcccaggtcgtataaggcctggtcgaattgttgtgccccgatcta

SEQ ID NO: 50107 - DNA, 725 bp, Oryza sativa
ccccttttttttcatagccatgcctttcctcccctttttttttctttttttcatcttctttttgccacgaacttttccagcagaagaaagcatagtctaatataggagtttatttaaatggaattttttctatggaaagccgacttccagtgtagaagcttagcttaattatatatgtggaaaaagatggaaatggcaatgaccccttgatcatgagagtatgaaagatatctaacacaagtcacataaatttgacaaagcttaatacaatgtcaagcaactatatgcataataaagttgatcagtaatgtacttgcatatggccttggtaagtataagatgaagtaaattggaggattgaggttttaaaacaattttattttgaaaacatattcccaagagtcataacacgagttgcaagaattcctttcatcttcaatcatctcacataaagctattaattagatgcaaaaggttccctaaacatggaaggtttttcacaagcacaagttcagctaagaatgatagatatacaagatcaatcatatgaagaatttcattagttggaaattttatctttcttatgcttgaaccgattgttttctgaattttcagctctagtactataccatggtggagatatacagatacaagacgtgctcacctgcttacctatgaaaactgagaggtattggggccaacactggtttggccgaacctggtgg

SEQ ID NO: 50108 - DNA, 1593 bp, Oryza sativa
ctccactccctccactttgagccaccgcccgtggggcccacatgccgtgccctttcctctctcttgagtcgctgacgtgcggggcccacctgtcggcgccccccttgctgacgtcagccctggggatttattgcgccataattaattaaggccttttctttattagtaaaaacacagattatcttctaaaattcataagtaattcatccgagctccgtttaagtccattcaagtctcaataaattcataaaaatccctagaatctattaaaaatggttttgttctctgttacagtagtcttatagcgtgtttttcttttgtgctttgtttgtcgcgtagatttcggccgcttcgtcgatccgcggtttctcgaagacgttgctgtggtctcatcagtgcgagagcaaggcaagtcatgtattacatttgatcgtattgtacccaatttacaaatatcccgcatttctattaaatgttgcattcttttacaatatcatatgggatgggtcctattattcagccatatattgtttaccttatgccattgataacttgggtttcaaaatgattagatgttggtttaggaaatgcttagccatgcttagttcaactagtacacaaagggggatcacattattacatagactttgactattagcatagctttggattggttccaccgcaatggtgttagttaattaaaatacactgaatggtgggctgtgggtgcatggtttcgctggtcgcacccatggcagttaaggaccagttcacgggaaaccctgggagacttaccgtgctgaccacaagagggagtgggtaactgcttgatctgaagtatagctcgacactttcctaggcaccggtggcgatggtgggcgtgatggagttgggtcggccggggtgtccggttgtctagctgccggattcaccgcggcgcaagaggggaccgcccactgccttttgaggggtgggggtgaaaccttagcgtggtgtgaatggttaggggagggttatgcggagggtcttgtcacgatttccccctttgcagtatcatggtgatacttcggggcatggcgacatgtgtggaatcatatcttgtgggtacagttgtacacctctggccagagtaaaactattcgaatagtcgtgctcgcggttatgggcgatcaaccagattcactgtgattagtctcacccctagtttagtttaatgcacattcagcttagaaattctggttcatgaatttctaggcgtgacattcgggtaaccccaaacggatatcgaactcagggaacgtgtataatctatctaaggctaagactatccaagaacaacaactgaaggtaggctaggcaggctagagaggactttctatgtttttaattatctaagctgagtaaaacataatttcctgtatgatgctccggacaccgacccctgctggtctgccaacgtggttccggctatagctctatgatttatccgaatgcggaggattactgggacgggattcagggctgtcaccacctgccgtctacctctgacaaatctgtgggatacacaataaacaattactactctaatacttg

SEQ ID NO: 50109 - DNA, 826 bp, Oryza sativa
cgtgatcccacacgaacctgccttaacccaaggcctacgatgattcaaaccgaactggcaacccgaccctgggtcccagctcgtcccaagccaacccaggccaaccattccacattttagttgttaagcaggttttaagaattaaaaacactaacttgggtacattgctcggctttcccataaccgagggcgcggctattcgaatagattatactctgatcagaggtgtacatctttacccacaagacacatcttcctcacatgtaaccatgtgccacataccatcacggtatacggacggaagacgtgacatagtttccaacccatcctagccatagacaagagtaccgacccaaccccacctacggccggaactgtcatgcccagaaattcccgagtagaattccaagcagaatgtgcattaaaatccccgtccaggaccggccggggtacacaaacgacaatgttgacattcagatccacgtcttacaaacatcataaaagtcttacacaaatgcagcggaagaaaagaaagacagcaggagctaagccttgactagaactgcagcgggaacaccactccacaggcatcctcgacggcacggacgaagcctactcctcggagaaaccttcatctgacacatactcgagctctggggttgggaaaaaaatagagcaagactgagtactacccactgtactcagcaagtcataccggaataggggtatgatgcagggaattatcaaagaagagctggagtggttcatttgcataaagcgagcatttataaacagaagttgaaagattaaacaattgtaaaattta

SEQ ID NO: 50110 - DNA, 651 bp, Oryza sativa
ccggtgaaaaacatcgcacccacgtgtgccaagatatggcaatattggcattaattgacaaaagttcgccgcgcgaatcacgaagtgattttttgccacgaatgcacccaacacactccaatatgtccaaaaatcatgttttggtgctttttgaaatttttcattccggtgaaaaacatcgcacccacctatgccaatattggtagtaattgacaaaagttcgccgcgcgaatcacgaagcgatattttgccacgaatgcacccaacacactccaatatgtccaaaaatcatgttttggtactttttgaactttttcattccggtgaaaaacatcacacccacctatgccaatattggcattaattgacaaaagttcgccgcgcgaatcacgaagcgattttttgtcacgaacgcacccaacacactccaatatgtccagaaatcaagttttggtgctttttgaactttttcattccggtgaaaaacatcgcacccacctatgccaatattggcagtaattgacaaaagttccccgcgcgaatcacgaagtgatttttttgcacgaacgcacccaacacagtccaatatgtccaaaaatcatgttttggtggcttttggactttttcattccggggaaaaaacatcgcacc

SEQ ID NO: 50111 - DNA, 822 bp, Oryza sativa
atgttttggtgctttttgaaatttttcattccggtgaaaaacatcgcacccacctatgccaatattggtagtaattgacaaaagttcgccgcgcgaatcacgaagcgatattttgccacgaatgcacccaacacactccaatatgtccaaaaatcatgttttggtactttttgaactttttcattccggtgaaaaacatcgcacccacctatgccaatattggtagtaattgacaaaagttcgccgcgcgaatcacgaagcgatattttgccacgaatgcacccaacacactccaatatgtccaaaaatcatgttttggtgctttttgaactttttcattccggtgaaaaacatcgcacccacctatgccaatattggtagtaattgacaaaagttcgccgcgcgaatgacaaagtgatattttgccacgaatgcacccaacacactccaatatgtccaaaaatcatgttttggtactttttgaactttttcattccggtgaaaaacatcacacccacctatgccaatattggtagtaattgacaaaagttcagcgcgcgaatcacgaagtgatattttgccacgaatgcacccaacacactccaatatgtccaaaaatcatgttttggtgctttttgaactttttcattctggtgaaaaacatcgcacccacctatgccaataatgggagtaattgacaaaagttcgccgcgcgaatcacgaagtgattttcattccggtgaaaaacatcgcacccacctatgccaatatttgcttgtaatgacaaaagttcgccgcgcgaatcacgaagtgatttttttc

SEQ ID NO: 50112 - DNA, 986 bp, Oryza sativa
caatattggcagtaattgacaaaagttcgccgcgcgaatcgcgaagtgatttttttccacgaatgcaccaaccacactccaatatctccaaaaatcttgttttggtgctttttgaactttttcattacggtcaaaaacatcgcacccacatgtgccaatatcggcattatcggcaaaagttcgcccgcgcgaatcacgaagtgatattttgccacgaatgcacccaacacactccaatatgtccaaaaatcatgttttggtgcttgttgaactttttcattacggtcaaaaacatcgcacccacatgtgccaatatcggcattattgacaaaagttcgcccgcgcgaatcacgaagtgatattttgccacgaatgcaccaaacacactccaatatgtccaaaaatcatgttttggtgctttttgaactttttcattacggtcaaaaacatcgcacccacctatgccaatattggcagtaattgacaaaagttcgccgcgcgaatcacgaagtgatattttgctacgaacgcacccaacacactccaatatgtccaaaaatcatgttttggtgctttttgaactttttcattccggtctaaaacatcgcacccacctatgccaatattggtattgacattaattgacaaaagttcgccgcgcgaatcacgaagtgattttttgccacgaatgcacccaacacactccaatatgtccaaaaatcatgttttggtgctttttgaactttttcattccggtgaaaaacatcgcacccacctatgccaatattggcagtaattgacaaaagttcgccgcgcgaatcacgaagtgatatttttccacgaatgcacccaacacactccaatatgtccaaaaatcatgttttggtgctttttaaactgtttcattccggtgaaaaacatcgcacccaccgatgccaatatgggcaagaattgacaaaagttccgcgcgcgaatcacgaagcgat

SEQ ID NO: 50113 - DNA, 898 bp, Oryza sativa
cattctggtgaaaaacatcgcacccacctatgccaataatggcagtaattgacaaaagttcgccgcgcgaatcacgaagtgattttcattccggtgaaaaacatcgcacccacctatgccaatattggcagtaattgacaaaagttcgccgcgcgaatcacgaagtgattttttttccacgaatgcaccaaccacactccaatatgtccaaaaatcatgttttggtgctttttgcactttttcataccggtgaaaaacatcgcacccacgtgtgccaatatatggcaatattggcattaattgacaaaagttcgccgcgcgaatcacgaagtgattttttgccacgaatgcacccaacacactccaatatgtccaaaaatcatgttttggtgctttttgaactttttcattccggtgaaaaacatcgcacccacctatgccaatattggtagtaattgacaaaagttcagcgcgcgaatcacgaagtgatattttgccacgaatgcacccaaaacactccaatatgtccaaaaatcatgttttgtttctttttgaactttttcattccggtctaaaacatcgcacccatctatggcaatattggcattaattcacaaaagttcgccgcgcgagtcacgaagtgattttttgccacgaacgcacccaacacacttcaatatgtccaaaaatcatgttttggtgctttttgaacttttttattccggtcaaaaacatcgcaaccacgtgtgccaatattggtagtaattgacaaaagttcagcgcgcgaatcacgaagtgatattttgccacgaatgcacccaacacactccaatatgtccaaaaatcatgttttggtgctttttgaactttttcattccggtctaaaacatcgcaccca

SEQ ID NO: 50114 - DNA, 670 bp, Oryza sativa
atcacgaagtgagtgttttccacgaacgcacccaatacactccaatatgtccaaaaatcatgttttggtgctttttcaactttttcattccggtcaaaaacatcgcacccacgtgtgccaacaatggcattaattgacaaaagttcgtcacgcgaatcacgaagtgagttttttccacgaacgcacccaatacactccaatatgtccaaaaatcatggcttgctgctttttgaacttgttcattcctgtcaaaaacatcgcacccacgtgtgccaataatggcattaattaacaaaagttcgccgcgcgaatcacgaagtgagtttttgccacgaacgcacccaatacactccaatatgtccaaaaatcatgttttggtgctctttgaactttttcattccggtcaaaaacttcgaacccacgtgtaccaataatggcattaattgacaaaagttcgacgcacgaatcacgaagtgagtttctgccccgagcgcacccaacacactccaatatgtccaaaaatcatgttttggtgctttttgaactttttctttccgttcaaaaatatcgcacctacgtgtgccaataatggcattaatttgcaaaagtttgccgtgcgaatcacgaagtgtgtttttgccacgaacgtacccaatacacttcaatatgt

SEQ ID NO: 50115 - DNA, 2971 bp, Oryza sativa
taattgacaaagttcgtcgcgcgaatcacgaagtgagtttttgccacgaacgcaaccaatacactccaatatgtccaaaaatcttgttttggaggtttttgaactttttcattccggttaaaaacatcgcagccacgtgtgcctataatggcattaattgacaaaagttcgtcacgcgaatcacaaagtgagtttcttccacgaacgcacgcaatacactccaatatgtccaaaaatcatggtttgctgctttttgaacttgttcattccggtcaaaaacatcgcacccacgtgtgctaataatggcattaattaacaaaaattcgccgcgcgaatcacgaagtgattttttgccacgaacgcacccaatacactccaatatgtccaaaaatcatgttttggttatttttgaacttcttattccggtcaaaaacatcgtacctacgtgtgccaataatggcattaattgacaaaagttcgctacacgaatcacgaagtgagtttttgctacgatcgcacccaataaactccaatatgtccaaaaatcatgttttggtgctctttgaacttttgaatttcggtcaaaaacaacgcacccacgtgtgccaataatggcattagatatcaaaaggtcgccgcgcgaatcacgaagtgagtttttgccacgaacgcacccaatacactccaatatgtccaaaaatcatgttttggttatttttgaacttcttattccggtcaaaaacatcgcacccacgtgtgccaataatggcattaatttacaaaagttcgctacacgaatcacgaagtgagtttttgctacgaacgcacccaataaactccaatatgtccaaaaatcatgttttggttgtctttgaacttttgaatttcggttaaaaacaacgcacccacgtgtgccaataatggcatttgatatcaaaaggtcgccgcgcgaatcacgaagtgagtttttgccacgaacgcacccaatacactccaatatgtccaaaaatcatgttttggtgctctttgaactttttcattccggtcaaaaacatagcacccacgtgtgccaagaatggcattaattgacaaaagttcgccgcgcgaatcaggaattgagtgttttccacgaacgcacccaatacactccaatatgtccaaaagtcatgttttggtgctttttgaactttttcattccggtcaaaaacatcgcacccacgtgtgccaatattggcattaattgacaaaagttcgctgcgcgaatcacgaagtgagtttttgccacgaacgcaaccaatacactccaatatgtccaaaaataatgttttggtgctttttgaactttttcattccggtcaaaaacatcgcacccacgtgtgccaatatatgccaatattggcattaactgacaaaagttcgccgcgcgaatcacgaagtgagtttttgccaagaacgtacccaatacactccaatatgtccaaaaatcatgttttggtgctctttgaactttttcattccggtcaaaaacaacgcacccacgtgtgcgaatattggcattaattaacaaaagttcgccacgcgaatcacgaagtgagttttttccacgaacgcgcccaatacactccaatatgtccaaaaatcatgttttggtgctttttgattttttttattccggtcaaaaacatcgcacccacgtgtgccaataatggcattaattgacaaaagttcgccgcgcgaatcacgaagtgtgtttttgccacgaacgtacccaatacactccaatatgtccaaaaatcatgttttggtgctctttgaactttttcattccggtcaaaaacatcgcacccacgtgtgccaagaatggcattaattgacaaaagttcaccgcgcgaatcacgaagtgagtgttttccacgaacgcacccaatacactccaatatgtccaaaaatcatgttttggtgatttttgaacttcttcattccggtcaaaaacatcgcacccacgtgtgccaataatggcattagatatcaaaagttcgccgcgcgaatcacgaagtgagtttttgccatgaacgcacccaatacactccaatatgtccaaaaatcatgttttggtgattcttgaacttcttcattccggtcaaaaacatcgcacccacgtgtgccaaaaaaggcattaattgacaaaagttcgtcgcgcgaatcacgaagtgagtttttgccacgaacgcaaccaatacactccaatatgtccaaaaatcatgttttggtgctttttgaactttttcattccggtcaaaaacatcgcacccacgtgtgccaatatatgccaataataattgacaaaagttcgccgcgcgaatcacgaagtgagtttttgccaagaacgtacccaatacactccaatatgtccaaaaatcatgttttggtgctctttgaactttttcattccggtcaaaaacatcgcacccacgtgtgccaagaatggcattaattgacaaaagttcgccgcgcgaatcacgaagtgagtgttttccacgaacgcacccaatacactccaatatgtccaaaaatcatgttttggtgattcttgaacttcttcattccggtcaaaaacatcgcacccacgtgtgccaataatggcattaattgacaaaagttcaccgcgcgaatcacgaagtgagtgttttccacgaacgcacccaatacactccaatatgtccaaaaatcatgttttggtgctttttgaactttttcattccggtcaaaaacatcgcacccacgtgtgccaaaataggcaatattggcattaattgacaaaagttcgccgcgcgaatcacgaagtgattttttgccactaatgcacccaacacactccagtatgtccaaaaatcatgttttggtgctttttgaactttttcattccggtgaaaaacatcgcacccacctatgccaatattggtagtaattg

SEQ ID NO: 50116 - DNA, 737 bp, Oryza sativa
cactccaatatgtccaaaacgcatgttttggtgctctttcacctttttcattcggtcaaaaacatcgcaccaccgtgtgccaacaatggcattaattgacaaaagttcgtcacgcgaatcacgaagtgagttttttccacgaacgcacccaatacactccaatatgtccaaaaatcatggcttgctgctttttgaacttgttcattcctgtcaaaaacatcgcacccacgtgtgccaataatggcattaattaacaaaagttcgccgcgcgaatcacgaagtgagtttttgccacgaacgcacccaatacactccaatatgtccaaaaatcatgttttagttatttttgaacttcttattccggtcaaaaacatcgcacccacgtgtgccaataatggcattaattgacaaaagttcgctacacgtatcacgaagtgagtttttgctacaaacgcacccaataaactccaatatgtccaaaaatcatgttttggttgtctttgaacttttgaatttcggttaaaaacaacgcacccacgtgtgccaataatggcatttgatatcaaaaggtcgccgcgcgaatcacgaagtgagtttttgccacaaacgcacccaatacactccaatatgtccaaaaatcatgttttggtgctctttgaactttttcattccggtcaaaaacatagcacccacgtgtgccaagaatggcattaattgacaaaagttcgccgcgcgaa

SEQ ID NO: 50117 - DNA, 1353 bp, Oryza sativa
  unsure (1)..(1353): unsure at all n locations
gcaaaaactcaattcgtgttcgcacagcgactttgtgcaatcattgacattattggcacacgtgggtgcgatgtttttgacggnaataaaaaagtcaaaaaagcacaaaacatgtagtgtnttggtgcgttcggccaaaaaatgacttcgtgtccgcgcgccgaagttgggtcaattaatgccattattggcacacggtgggtgcgatgtttttggccggaatgaaaatattcaaaaggcaccaaaacatgatttttgaacatattgaagtgtatggggtgcgctcgtagtaaaaactcacttcgtattcggcgcggcgaccttttgtcatttaatgccactattggcacacgtgggtgcgatgtttttgcccggaatgaaaataattcataaagcgccanaccatgatctttggacatattggagtgtatgggggcgttcgtggcaaaaactcacttcgtattcgcgcggcgaagttttgtcaattaatgccaatatgagcgttcaaagagcaccaaaacatgatttttggacatattggagtgtattgggtgcgttcgtggcaaaaactgacttcgtgattcgcgcggcgaacttttgtcaattaatggcatttttggcacacgtggggggtgatgtttttgaccggaatgaaaaagttcaaaaagcaccaaaacatgatttttggacatattggagtgtattgagtgcgttcgtggcaaaaactcaattcgtgattcgcacggcgaacttttgtcaattaatgccattattggcacacgtgggtgcgatgtttttgaccggaatgaaaaagttcaaaaaagcaccaaaacatgtttagtgtattgggtgcgttcgtggcaaaaactcacttcgtgattcgcgcggcgaacttttgtcaattaatgccattattggcacacgtgggtgcgatgtttttgaccggaatgaaaaaattcaaaaagcaccaaaacatgatttttggacatattggagtgtattgggtgcgctcgtggtaaaaactcacttcgtgattcgcgcgacgaacttttgtcaattaatgccattattggcacacgtgggtgcgatgtttttgaccggaatgaaaaaattcaaaaagcaccaaaacatgatttttggacatattggagtgtattgggtgcgttcgtggcaaaaactcacttcgtgattcgcgcggcgaacttttgtcaattaatgccattattgggacacgtgggtgcgatgtttttgaccggaatgaaaaaggtcaaagagcaccaaaacatgatttttggacatattagagtgtattgggtacgttcttggcaaaaactcacttcgtgattcgcgcgg

SEQ ID NO: 50118 - DNA, 892 bp, Oryza sativa
aaaaaatcacttcgtgattcgcgcggcgaacttgtgtcaattaatgccaatattgccatatattggcacacgtgggtgcgatgtttttcaccggtatgaaaaagtgcaaaaagcaccaaaacatgatttttggacatattggagtgtggttggtgcattcggggaaaaaaaatcacttcgtgattcgcgcggcgaacttttgtcaattactgcaatattggcataggtgggtgcgatgtttttcaccggaatgaaaatcacttcgtgattcgcgcggcgaacttttgtcaattactgccattattggcataggtgggtgcgatgtttttcaccagaatgaaaaagttcaacaagcaccaaaacatgatttttggacatattggagtgtgttgggtgcattcgtggaaaaaaatcacttcgtgtatcgcgcggcgaactattgtcaattactgccaatgcataggtgggtgcgatgtttttcaccagaatgaaaaagttcgaaaagcaccaaaacatgatttttggacatattggagtgtgttgggtgcgttcgtggcaaaaaatcacttcgtaactcgcgcggcgaacttttgtgaattaatgccaatattgccatatatgggtgcgatgttttagaccggaatgaaaaagttcaaaaagcaccaaaacatgatttttggacatattggagtgtgttgggtgcattcgtggcaaaatatcacttcgtgattcgcgcgctgaacttttgtcaattactaccaatattggcataggtgggtgtgatgtttttcacccgaatgaaaaagttcaaaaagtaccaaaacatgatttttggacatattggagtgtgttgggtgcattcgtggcaaaatatcactttgtcattcgcgcg

SEQ ID NO: 50119 - DNA, 513 bp, Oryza sativa
acaaaagttcgccgcgcgaatcacgaagtgattttttgccacgaacgcacccaacacactccaatatgtccaaaaatcatgttttggtgctttttgaaatttttcattccggtgaaaaacatcgcacccacctatgccaatattggcagtaattgacaaaagttcgccgcgcgaatcacgaagcgatatttttccacgaatgcacccaacacactccaatatgtccaaaaatcatgtgttggtgctttatgaactttttcattccggagaaaaacatcgcacccacctatgccaatattggcagtaattgacaaaagttcgccgcgcgaatcacgaagtgaattttttcacgaacgcacccaacacactccaatatgtccaaaatcatgttttggtgctttttgaactttgtcattccggacaaaaacatcacaaccacctatgccaatattggtagtaattgacaaaagttcgacgcgcgaatgacaaagtgatattttgccacgaatgcac

SEQ ID NO: 50120 - DNA, 860 bp, Oryza sativa
acaggtgggccccacctgtcggcgaccccggaagaagaaggaggcgggcggcctggctaggcctcggcttgcggccggcccagcggggaagggaaagagggaaagaatgggccggcggcccattcgaaaagaaaaggggaaaaaaagtgaaagaaaaaggaagaaaggatttccctggaattaaaatattgcttgctcaattttaattggttaaaattatttctagggctctgaaaattccactaaaaatcttgttagcaaatttcgacatgtagaactcaaaaaaaattccacatgccagtttcgtttattatttgcattactttattagggttttctcttgatttgcactggcattttcttagggtcatttataaattaaattttaggcttgggagaacttcagggtgtgacagtgattcgcgcggcgaacttttgtcaattaatggcattattggcacacgtggctccgatgtttttgaccggaatgaaaaagttcaaaaagcaccaaaacatgatttttggacatattggagtagtgtattgggtgcgttcgtggcaaaaactgacttcgtgattcgcgcggcgaactttggtcaattaatgccattattggcacacgtgggtgcgatgtttttgaccggaatgaaaaagatcaaaaagcaccaaaacatgatttttggacatattggagtgtattgggtgcgctcgtggaaaaactcacttcgtgattcgcgcggcgaacttttgtcaattaatgccattattggcacacgtgggtgcgatgtttttgaccggatgaaaaaattcaaaaagcaccaaaacatgatttttggacatattggagtgtattgggtgcg

SEQ ID NO: 50121 - DNA, 1188 bp, Oryza sativa
  unsure (1)..(1188): unsure at all n locations
taatgccattataggcacacgtgggtgtgatgtttttgaccggaatganaaagttcaaacagcaccaaaacatgatttttggacatattggagtgtattgggtgcgttcatggtaaaaactcacttcgtgattcgcgcggcgaacttttgtcaattaatgccattattggcacacgtgggtgcgatgtttttgaccggaatgaaaaagttcaaaaagcaccaaaaacaagatttttggacatattggagtgtattgggtgcgttcgttctaaaaactcacttcgtgattcgcgcggcgaacttttgtcaattaatgccattattggcacacgtgggtgcaatgtttttgaccggaatgaaaaagttcaaaaagcaccaaaaacatgatttttggacatattggagtgtattgggtgcgttcgtggaaaaaactcacttcgtgattcgcgcggcgaacttttgtcaattaatgccaatattggcatatattggcacacgtgggtgcgatgtttttgaccggaatgaaaaagttcaaaaagcacgaaaacatgatttttggacatattggagtgtattgggtgcgttcgtggaaaaaactcacttcgagattcgcgcggcgaacttttgtcaattaatgccattattggcacacgtgggtgcgatgtttttgaccggaatgaaaaagttcaaaaagcaccaaaacatgatttttggacatattggagtgtattgggtgcgttcgtggcaaaaactcacttcgtgattcgcgcggcgaacttttgtcagttaatgccaatattggcatatattggcacacgtgggtgcgatgtttttgaccggaatgaaaaagttcaaaaagcacgaaaacatgatttttggacatattggagtgtattgggtgcgttcgtggaaaaaactcacttcgagattctcgcggcgaacttttgtcaattaatgccattattggcacacgtgggtgcgatgtttttgaccggaatgaaaaagttcaaaaagcaccaaaacatgatttttggacatattggagtgtattgggtgcgttcgtggtaaaaactcacttcgtgattcgcgcggcgaacttttgtcagttaatgccaatattggcacacgtgggtgcgatgtttttgaccggaatgaaaaaatttaaaaagcaccaaaacatgatttttg

SEQ ID NO: 50122 - DNA, 509 bp, Oryza sativa
tccgatctaccctcaggtagatcagggccatccgtcgccgcccacgtggccgccagtgtggcctccacctcggcgccacgtcagcgccacatggctcttcccctttcggtcccgtggactcggtccaccatggaccggtgcgccttgagtcaatgacatgcggagccagcttgtcggcgccgccccctgctgacgtcacccggggttaattaattgtgcaataaattaattaagggtttttcagttatagtaaaaacatagtgaatcttctaaaattcatagaaaattcatctgtgctctgtttaagcccattcaagtctcagtaaatcaagaaaaatgcgaagaatccattaaaaatggttttgttatctatttcagtagtcttatagcctgtttgcattgtttgctttatatgttccgtagattccgactgtcccgacgttccggtgtactttgagatagtcgccgaagtccctctagccgcagagcaaggcaaatcatgcttgtca

SEQ ID NO: 50123 - DNA, 675 bp, Oryza sativa
tcagagaaggccagaccgagataagggagacgatcgatgccgggcatgacgcatattcaggaagtcgtatgagagccttggcacatgggatggataagctgaaggaagaggctgttgatattcagagggagatcaaaactgttggtgattccatgtccaccaagatgcaggatttgcagagcactgcaaatgatattgggagtgtggctggcaaatcattggagaatcagatgcaacttttggatggacagagcaaggccatggacggtctgaataatctgtacagctttcaggcacaagctcttgaggaaagcaggtattttaacttctcgcttccattattctttttttatttcattgtaaaatatactgattttgactggaattttcagggagactgtgcaaaaacttgcacagtttggccagcgtcagcaggaagagttattgtccaggcaggaagaaatccggcaagctcatgaacacctgattcataattcacactcaatactggaagctcaggttattgtctcctcctgcatatcagaatacgagcaatagttttccttttgtttgactgattaaccatgatcaatcagtaggcataggattgacttctttttcaactgatcttttctccttgtgtcctgcaggaagagttcagagcaaagcaggcca

SEQ ID NO: 50124 - DNA, 1867 bp, Oryza sativa
tgccacttgtgatatcgaggccacgtcggctgtcgccactccgacgtggacccgaccgtgagggagataaagattttgggatgggaataatggtttttgtctcatcttctctcaaggacgaaaattcgagggagagtatacgtgtagatgcacgtgtagtgttcgtaaaggatgcgtactatggttaggtcagtgtaggagcttgacttggcatgggacattgacaaatggcctatgtatggtacagttgtttgtttctttttttttctacgtagtcagcaattcagcattgcatttcaaacagttgttttggttttttttttcgaaaaataaatatgaaggtaaaattaaccgcagagtttgtacttttctagatgacacagatttgccatgaagaagtttatgaatacatgcaatttatttacccgttgatcgtggtacgcaccaaccatacaagttctagaagattcagcagagaacaatattccactaaccatatgttatttagggataaggtgggacggattgaactcatcctattttttggataggatggtccaatatattgtttggcatgagagatattcctattttttctacatgttagcaaaagaaaaaagtgaattggattggtccaccattttttaaaagaacaagccaacccggatcttagaagaatattcactgtcagccccatcctatcccacatgtctctaaaacaacatcctaaaaaaatgggtataacccaaccctacctatcaaaacccttgaaccaaacacatactaagtacacccaatgttgctacaatgttttatactatgctgactacatcttcgccaccttaggggtcaatagtccacggtgatttttaccatactaaatcatcctatgaaaaaaaaggcaatttctacaacccatgatcatctctgtgactttaaacaggaccattctcattccatctcctcccaccacgtacagaacgtttgccgtaaccaccggattcaatatcttatctttaaagagtctaagagcaatttccttattatgggggcatagcccattacaagataccaatagattcctagtactccctccatccaaaagtattatgacatattttttttgtcatcaagactatgaaaaggtagagtcgtagcaaagaacatagccacagcatgccgaataagggcaatagcagtgcaaggcacgcttgccgtgcctccggcccattccagcaaggcgcagtctcgtgaccccacgccttcctccttatcctcacgcgtcacgcccacgcgccgcttttctcctcatccccacgcgccgcttctcgtcatccccgcaccgtcgacgagctaggccccctcctctctccgccgtcgccggcctcccctcctccctccgccatcactggcctcccctcctcccttcgccatcactggcctcccctcctccctccgccatcactggcctcccctcctcccttcgccggtgagaggacagagacgacgacgacgcctggttgaggaggccgaggcggcaacgtggatctggaccggcgatggattggtctctcttctcttcccttgccagctcccctctcacctcacctctccggacgagcggcggcgaaggtagagaaagaggaggcgaaggtggagaaaaaggaggcaaaggtagagaaaaaggtcacgtcgaatcgaagcaacgacttctacagtgcgagtttccttcgccacacgcccttgttgcggtgagaacacgtgtctcccagttagggggcaagcagccgagcaaaggtgcgggtcttggcgccacgtacgcgtgaatccgagctggcgctgtaggagaactgtgaagggcctaaag

SEQ ID NO: 50125 - DNA, 662 bp, Oryza sativa
  unsure (1)..(662): unsure at all n locations
aaactgttggggattccatgtccaccaagatgcaggatttgcagagcactgccaatgatattgcgagtgtggctggcaaatcattggagaatcagatgcaactttcggatggacagagcacggccatggacggcctgaataatctgtacagctttcaggcacaagctcttgaggaaagcaggtattttaacttctcgcttgcattattctttttttatttcattgtaaaatatactgattttgactggaattttcagggagactgtgcaaaaacttgcacagtttggnnnnnnnnnnnnnnnnnnnnnnnngtccaggcaggaagaaatccggcaagctcatgaacacctgattcataattcacactcaatactggaagctcaggttattgtctcctcctgcatatcagaatacgagaatagttttccttttgtttgactgcttaaccatgatcaatcagtaggcataggattgacttcttttcaactgatcttttttccttttgtcctgcaggaagagttcagagcaaagcaggccaacatttttgctgctctggacaaactttacatcctccacaacgccatcttagccgagtcacgtttcatcaaggcgttcttcttctactgctgcatcgtgtttctcatctacttgctcacaagcgc

SEQ ID NO: 50126 - DNA, 1920 bp, Oryza sativa
ttgttacttaatatgagtatatgcaaagtgaaattccgattccaaattaatcactagtactactggagtagtacactatatttccccttgtttattgaatcatatagaaattaaaggaggaaaaaaaagaggagcactattaaaaaaagttggctaggcctacctccttgattccttgtagaaccttgtcaatcataacttgtgaacgcacactttaatttaattttgatatttttgagtccccacacatcacattttttccccactttcctgacacttttatgtgattcacaaagaagttctcctgtatcaagcaaagaacactgatgattattctgagccggatgcattgatatatgatggattaaaaaaaaatgcattgatgcatttatgagtcagaagagactattttgatgggaatagtaccatgataacgactcaaaaatatataatgtctattgaaaaatagacataccaagacgactaactacaattatcataatagacctacatatacttcatgtatatagaacggtttcatgacctggcaaatgtgtggtaatacactatatatgactttaattgcttaatttgatcatgatatttctttatatggttatatatttaccttatgttaatttccttttatatatactactatgtcattaattagtattatgccccgttctaattaatttcatttttttttatttttatggtcccttctgtgtttgattcatcttgaacatgatttctccacgagtgggcaatggtgctccacattattgtgctacacgtgtgacaactaattagttatgccactgctctctctgatctgcttgccgaccatatgtatacagcagctgagagagatggagagatagaaccccctccatgtattacactatgtcactaacaataaaaatatggaaaaaaatatttgtatgaaatctgatcttgtctaaagccgcagtaaagcaattaattgatcgagtatagtattgaggaaattaaaattattttcgacagtacgtgtgtgtatatataatatgtgcttccatactagcaaattacactacgcacaactatatgtatgcaatattttgttgattatataaacagctagctagcattgcatgactctttctagatgaaaaccgctcatatacacacgtacttcatccgtttcacaatgtaaaactttctagcattgtccatattcatttagatattaatgaatctagacatatgtatgtctttatattcattaacatctatatgtatgtggataatgttaaaaagtcttacattctgaaacggatggagtacatacttattcctatgaacatatatacacgtacattttatccctataaacactttcgaaaactaaaataaatatttactaattgcgcacaagaccactgaacacatcgttattaatcacgctgctaaataatattaatattgtcttctaaaatagttattactccatctgtcccaaaatgacttaatttactgcgttcaatatttgttaaaaaaagaattaatttttatcccctacccttgtccatataaatcgtggagttttatccattcaacatatatcctttagctacccatttggcaatactactttcctacaaataatacttcctccgtttcacaatgtaagactttctagcattatccatattcatttagatgttaatgaatctagacatatgtatgtgtttaaattcattaacatctatatgtatatagaactttctagcattgtccatattcatttagatattaatgaatctagacatatgtatgtctttatattcattaacatctatatgtatgtggataatgttaaaaagtcttacattctgaaacggatggagtacatacttattcctatgaacatatata

SEQ ID NO: 50127 - DNA, 1962 bp, Oryza sativa
gaaaagaaaacagttgtagcccatcaaacaattttaagtcatcttattttctcgaaatatccagtaggattaagcaataagcatcgttagtgagaattgtatttattgattttatttcctttatttgaaaacaagtcaaacgacctatctaggtttagcagacgtttttcactgttcatactctatcactaatcagagtatcagagaatgaattcctttctttgaatacaagtcaaacgacccatctagttttagcagaggtttttcgctgttcatactctattactaattagccaatgagagaaatggaggtatgaatccaagcttgtcacatcaatggtgcggccgccggcgccgccgctgccgttttccccgtgcaaatctcctctccggtcaagcgattacacataaaaaaccactcgaatcgttgtcatttttcttcgtcttccgatcaaaatcaaacacgcattcaatccgagagtcgcaactcgcggactccatgataaaagcagtgtgtgcttcttgttttctggtcgtcatctgaagacagcgatcgacatgcgtgtatgaaatctggacttcagtcagccagaaaagaaaaaagaaaaactaaatgcaacattagcatttaaaactaaatcaggttatagaatgtattattacaactctataaaatttatattacaactaaattggagtatttcggtgagaaaggctatgcatctggtgtatgaacccgtttgccgtctgacaccgacagacgaaggtgaacgagttttcggccgtagtatcgtaagcaacgacgatgttaagagcaagacggtcaagttcgcatttggagtcgtgacgaacgcctgtttagctggtgaaatgaaaacttttgaatgtcacatcgaaactggatgtcggaagggtttttcggacacgaatgaaaaaactaatttcataacttgcttggaaaccgtgagatgaatttttttagcctaactaaaccgtcattaacacatatggattactgtagcacttatacctaatcatggattaattatgctcaaaagattcgtctcgtgatttacatgcaaactaagcaattagtttttctttttatctatatttaactagcaaaagtgcctgtgcgtttcaccgggtgatcacggagtgtgtacagtgataaaaagtgttgtttggtttaatcaactaatctgctcaaaaaaaatttttgtttttagataaataatctgctctatatttgtggaatatatatgatgtttagttgggatgatttgtagcatgggagaaaatggatgaacgaacaatgcgattttctttgcccaaaaggcgacggataaaaatttgtatcacaaatggaaatatttatttttttatgtaggtaagtctaataaaatatgagtggaatttttgtactaaatgtactttgagttgcgagaatatatacttttttagaaacacgagcaataagattgacgaagttaccacaaacgccttgagcacccgtcttaaatcaaagatttgaatctaggttgattggttcctccacaagaaacctatccagttaaattatacccactttgcaattgtgggaatatacctgtgtattggtacctaaataaaatgtgttgagtttaacaaatcgtaaaaatcaatcttattatttttgtgagagtaagtattgtttttttatttacaaattgtatttgaggtcaaatattaataagtagatataaaaaaatgaaagaagattataaagggagggaaaaaaataaaaaaagagcggatatggacaaagaaaaaaaaaagagcagagggaacaggtcaagatatttttaaatgttaaacatttttaataatgagatgcccgtgcattgcagcggatgaactaaaaatataataaatataaaaatattataggattaggatttagattttatgatatgagccccg

SEQ ID NO: 50128 - DNA, 1139 bp, Oryza sativa
gcatgtatatacattactatacatcgtaaaaaagagagcctattaaacatcaaccgttgattcattaaagggtagtttagagattggaaataacataacaggtagtttagttatccatgatcaactggaacttctctcttggccggctgtttgctgcctgcccttgattctttcctgttttcatagtcatcggtgttcgtcgtcgctgagttaaaaaaaaacaaaaactgtaatgcaatatcaagggggcacatgtacacaaagcatgacagaacgtataagctgaagataattactaagaactcattgcatgtgcgtctttgtgtagtttgtcaaaatatttctcacttactatggatgttatcttagaaacccctggggttgaagatgtatcgtcattatgaaacatgactctttgaagcggctatgattatcattgaacacggaaccgagaagaacaagcaactgttccagctaagttattggaggcgaaagagaggaatttgaaacatattggaacacaataacacgaatgagaaaataaacaccctgtgtcatcgatacagagtcaatatatgcagtaagttagagcatcacaacagtcctcctatatttttttctcaaaattgattttgaggaattttatgtgaaaaatgggatccaacagattccttataatcctacatacattttggatttccttccctgtatttctcgctcagttgatttgagggagagaagcgctcccctccgactcccagtccaatcgtgtctctcccgcgctagtgagcagagctatctattcccgcaaggtatttcacgcgcaaggagaaaacaggaaaaccaattctgttgttagttcaacagaagggcacacttttattttttttataaaatttagactttctcttggagatatctaggtagggattatatataatctctcagtgatgctaggaacagttatgaaatataaattggacctctaatctaaatgcatctacttcgtataaccctcgcatctggaattctggattgcgcatatcgggcccgtgcattgtttcgggcccagtgctaagctctattcatgttttcctttctttccttttggcgcttcccacgcttgaagcccatcagga

SEQ ID NO: 50129 - DNA, 867 bp, Oryza sativa
gagggaggcggccggcccagcggaggggagaggaggaaggagaatgggccggcggcccactcgaaaagaaaaggaggaaaaagaaaaagaaaaaaaagggaagaaaaggattttccctggaattaaaatattgcttgctcaatttcaattggttaaaattatttctagggctctgaaaattccactaaaaatcttgttagcgtatttcgacatgtagaactcaagaaaaattccacatgccaattctgattattatttgcattaatttattaaggttttctcttgatttgcagcggcattttcttagggtgatttataaattcaattttaggcttaggaggagaactacagggtgtgacagaggacgaccggccgcagacatagaagcgtcaagcgcggcggcgacgcaatgatagccggcggaggcgaggtgaacagtcccgcgatggcacatggcgaggatgcacgttccggcagcgagcctggctccagcgctgacgggggcggggtggctggcatcggggtcatctcttggggaagcagcgccccggggagcagcgccggcagaatcttgtcggccgcagcgtcgctggccagatcttccaagcggcgaggcggggacgctgcgagaggtgccggtgacatgggctgtggtaggagagtgtcatcgcctggggtgcgagctgcagcgacagccagctcaaggcgcatcagcgcctcctcaatttgctggcaggttgtcagtgtgtcgaccgctggcgtggccggcaaggcctccctgatgcggccaaagacgcgcgcaacaggcaccggcttccatgccgtgctgccgaaccaggcttcagtcccagtaaaagaccggatggc

SEQ ID NO: 50130 - DNA, 1214 bp, Oryza sativa
aaaagaacaattgtagtctgagattgattgctgggaaaataaaagttaaaaggaatctacacaacctttcaatccaatgtcgtgatgtaatggcacaacaatgcagtacatcatatagctgcattatttagcttggattgtactaatgctgcaatttgcaggcatggtcgttgcatcaccggatttgttttggattggtaacagtagcaaacgtggcctccaacaaaggctgcctacggtccaacaaaggtggtactggtaataattcttgcagattagggtggccgcttgtgattgcgggtaagaggccaatgaaagtggtcgatcttgtctctaatggaagctagcgttccctttgccattaagctgctctcccgtgtcattcttccgcgattaagacccgcctcgtcatgtgggttttgtcctatcaacaagatgcgtcttaagtcgctgtcgggctatcgagccattaggacggtgctgatcgatggtacaaaacatttgctaagcaaatttcagaggtcgtacgaaggaagaaaaaaggaaaaatagaaaaaggccgtgtgacaaactggctcgtgacccgtttgacattgctgtctagctagtccctactccctccgtctcaaaaaaagacaaaccctgaattttcgtgtccaactttgaccgtccgtcttatatgaaatttttttataattcgtattttcattgttgttagatgataaaacatgattaatattttatgcgtgatttgtctttttaatttttttatatttttttcaaataagacggacggtcaaacattggacacggaaactagggtttgtctttttttgggacggagggagtacgtcttaatttcacgtgaaaaaaaataatgcgggattcatgatatatcaatcgatcaactaagctagatctgtttggcaaataatgtaatggttaatcagcgagtaacaataattaactaatattctttctcttcattccacaatatatttatctttagggcttttcagtggagaggtgaaattaaatgaggaataattgtgatcgattgagattaaaagtaggtagagaaatagatataattcaaaacaaaatgcaaatggtaggagaaattgtattttgtaatggaggaagtacacccattaggaatgtggattttaaataatgggcagccggtcattcgcttttaacagacaaccagttat

SEQ ID NO: 50131 - DNA, 1682 bp, Oryza sativa
gcgggagtatgtattacgcggcgcccctggttggcggtgggcgcgtacgtacggtggctcggcaggatatatgcatgcatgggatgggaggaggatcttttgttgggatttttatttgaatcaaagaaggccttattacacccaccatgaacagtcacacgctttctttttctttttttaacgaatcggcgagccgctaatttcattaaatatagtagaaaaaaactgtacagtgtaaaggaaaagaaaaaaactcaggacctttggccctagtcaactaaggaacaagccaatttttcaaatgatgcgcgcctgctaaggcccatgtcttggtctcttccttgatttttgtcacaagaccattcggtgggagctccttatgctggaatgttctgcgaattctttcgttccaacagtcacacgtttttcatcatgcacatgtttttgatcaacagtcacacgtttttcatcctgcgcatgtttttgatcaagattagaggctagtgtgtcggggagattgagaccgagagaaagatcatcaatttactctagggctgagctcccctttttttttttatctttgcgttgaagggaattgtgggcagctccaaaagaaacgaatttgggcaccaccaatcacgacgtgtagttaagtgcgtaaaattttaacgcaaattaaatcgcaatgatcgtgcgtagataatgggtggaaacggtccttcgcgtggtctttcctcactgagagatcaaatttccaagacccggaacttctctaaggcctagcccagctaaattaacacatctcggtagcaatttcatctacttgaaacaaagtcattggagtactgttgcaaattatcatttgattacaatgataaattaaatattttgagaaataaaccgaacaagtggtttaaccaatgcaacgcaaagcaaacaatccaatgaagtaactataaaatgggttacatgtatgatgtagagagtactagtgtactaccacacatctaaatttgaatcccaaatgagattgagcccggccgctagctgcatgcctgcaagcagcactaggagtaggaaaacaaaatctcgtttgttttgcccaattggcagccgtatcaaactttggtactgtttaggggagcttgtcccagctacagcttttatcaaaaactgcttctgcaagaagctgccctaaacagtccacagcttctttacagattctgaaaaataaactaaaaagtcagaagctggagaagctaggtttcagagctttttcagattcttagaagctgactaccaaacagctgcttctcagaatttaaagctccccaaacataccctatatccatgcaaccaattccaaagtaaaaaaagaaaaagaaaaaatgcacccatggtcacgggggtcatgcagcgaagtgtggttaaaaagccaagccatatactaggtgcatgcatgcagcagcgaggagagaaagagagcgagattgagagagagacagtaggtgacccacacccaagcgccttggtccaccacaggggaatacaggggaatccggctcccggccaagcgctgccggacaaaccctcccgtccgtctcacaaagaaagccatctccttcgcaaagcagcaaaaaacccagccacactgtacacagagatgttgtcagatgtgttgc

SEQ ID NO: 50132 - DNA, 3294 bp, Oryza sativa
atatgcattttccgtgcccactggtgatcaccacacaagctagcacaaatatatatttttttagaacacaatacaaacacagttggtcgataggggcgtggggcactcatttctataaatgcacacacgtgcatctacttcctactcccatgagtatctaaaactgggctagcatatcttgagattgacgaagtcaccaagcgcgtctcgctatcgacggatgcgtcgtctacaacttgaaataatgtgtcaaatttagggcgtgtttagatccaaagtttggatccaaacttcagtacttttccatcacatcaacctgtcatacacacataacttttcagtcacatcatctctaattttaaccaaaatccaaatttttgatccaactaaatacagccttagaacttaaatttaggtggattggttctgccacaagaaatctaaccattttaattgcgctcacttcgctatcccaaagatatttgacaagagagagaaggagaatgagaagggtctctccctctcttggcctcacctcctgacacagtgccagctatagggctcacactgtgtagggttttcacctcatgcttgggggcgtcgtcgccgctttattccaatccttgtagccatgcggcttgtgcatgtatatatggatggatcgggaagccgagcttctgtgtggcgctagcttgatgaacgatgagctgctactactactacttgtggcagcagcagttgctgcatgctagtagcttggaggagcgtgcaatgtgcgcgcatgtgtgcctgtgtgagattggatgggacgggaagggggaatagggcactttgaggcagagctctctctatgctttgctttgcttgcagctgcagctgcagctatttataggggcgagcaacaagaagcttgtcttcctccccatcctgcacatctccaaagctctcttctcaccaaacagacatgtagtacgaacgccattgttcatcttgtactactttctgtgtgtgtgtgtagttgtgtactgtctcttcttcttcttcttcttcttcttgtttctccagctgccatctccatcacaatgtcatgccagctgagctcttggctttggtggagtagtagtagttgtgttgatgtacatatataggagttgttgttgtcttctcttctcttctccaagtgttctgggctttgagtctagcattggggtgtgtgtgtgagatgagcactgcagtgttgaaagaagggaatacatggcatattggcaaggatgcagaaggtttggaagctgaaaagcaaaagagaggtgaaaaaaaggggatatgcctggctccctgtatgccactcgcgtagctgccaaactcagttgaaacaactgccttctcccggcgagattcaggcattgtgttcgtacgtttggctctactgcggatggcgtgcgaggagccaagcatgaccgtctctctctgtctctatctctctctcattgactcattgtgtgtgctcacttaagattacacgcttaattaaacctgataaacatggatcatacggtagtttatactgcagttttagtagtcttattagttcttattacaattagtctcttttaattagttatgcgcttggttatggtttcttattagtttgatgagtagttatgcttaatacatattgcatgcattttatttttcgcttgtgtgtgacgctgtcatgatttgcagtaagtgagcaaacctgtgtatatagtgtgtactaatagttctctggttgattacacatctgcatgcagtcacttggtgagcaacttctctgaaaaaaattattgacagcctagctagtttgtttcatgtactgtttgccacctttttctgatgcatggtagtgctgactgctgacataaatgcatgcatatacaattgttgtcatggttttctatcttgatctgattaggagaggttagattatggtagatgcatgagctgacctgtgtgtacgattgatatcatggtcttatatcttgatttcaagtgactgatcatgcatgccaattgattacgcaattatgcatgtgtatatgtatgtattagtttcagatccttggcgtttgatggagtgctctcttaattcttaattttgtcttgcccatcttagagagttcgagatgagatggtagattgttcagccctatataatataggactgtatatcttatctgtagggtttatttgtagttgttggtcatttggcatatatatatatatatgagtgtatgaaggtggtcagttggtgtcatataattatgtatataggttttataaatttagaaataattcatcaattaatttaccttatatttcatacttataacatatttaatgtaataagttgcaacgataacgaacgaatatgatgctagtccaagaaaatatatataatacctgcatttcagaaaatcttgagcctttcttcttttttccttttgggctgcgcttggactcgtttgctctttgggcctagtcaattgggctgggaattttcaggccctggaggggcccgtttaatttctccaacacctgcagtacataatgcgtactctgtcaattatgtacaaaattatctaaaattaactacaaaattatgtactaataaacttagcttcggtcataagcttaaaaggcaaattaatgatggaaaactaaacttatatttttaaataaaaatcctgcgcttcccacaacttgcagtcacggtcaacacgaaacgaatatccccaaaacacaaacaagttacaagtccttaaactggagtaatactcaaggaaaaggagatgtcagtcacggtcacagcctcacaggaaaacgatcccaactccgactcacgctcacggctcatgttgttgcggtgttctcaacgacgaaattcccttatcaactcggattctttcttctgaaactgaaacggacatctgcacacagcgccgatcgagttcgaatcctacacccgtatccaccccctatatacgcagcgctcctcgccgccttgaacctcacagcgaaacctgatcaccaccccaccaaccagagttcaccacgatcgcttcaatacttcgatctacgcacgagcgccgcagccgagaactcatgctcacgcacgcagcagccgccgctgaggaggaggagagcgcagcgccggccatggaggactgggtcgttctcagcgacagcgacggcgacagcgtggagctccacgacggcagcgacgtctgcggctccgacagcgagagcggcttc

SEQ ID NO: 50133 - DNA, 2422 bp, Oryza sativa
atgatgaggaagaaatcgactgtgaggaggacctggatgatgatgatgatgattgtgagagcctcgacgacgataacattgaatgctttgatgcagaagacataatctgtttggaaacccggacgatgaaatctagtaccaatatagccatgtaacatcgatcccatgtgcagcctcatctaatcatcgaattattctgcattttacccctactttgggtcgctaccttttatgttttgcccccatataattttgattgcgtgtcaacacaatgttgatcgtggttgtgcatatactatcagttattcaacttcacatctagcacctgcctagttgtctttggaccctatgtatatatactgtggccttgtttagttggggaaaatttttgagtttggttgatgatgagagccttgacgacgatgacattgaatgcttcgatgcagaggacataatttgagaggagaacccggacgatgaaatcatgtcccacttgttaacctagctagtaccaatatagccacgtacatcccatgtgcagctcctgcaaaaagagacaaaaatagtgatgttatatctccaatcaagtagtttacaggcatacccagttagtgaaattctttttcaaaaaagaaaaggaacccagttagtaaattatcacgaagaaattagatgatagactatatataggtgcttctcatcgtctgagaaagctagaatatttgatgacagtagttttatgtgtggtttggtggcacccgagttctcagtagagaacgattgatcaagcacctttcttagaaattatctggatgccttccactcctagtaggagggcaatgcaattctcaaacatttctcacccagctacactcaagcacatcacagcttgttgttctatcagtgtacaacacgacagcgtcttcttctctcacttctcagttatcaggcattagacaaggtatttgatgaatcagattcagaggataaggtgagaagcagccatgaatgaggccatgtatatatagagaagatggctggcctgttggctgcatgttagttgtcattagttgtcagagatcgaagaagagtttaagcagagttggtataggatcgaattgatgaaaaaagtttcagaaaagagctagcattgttgaaattacagtaaccgttgctccttttattttgtgctcgttttccttttgggcatggctaattgggcattttcatgctattttaatttctcaaacacccgaatagctgcatatgaatactctgccaaaagaactgcaaatattttctttttctaagaactgtacatccttctcttcgtatttgagacgaactctagtactaaaaacattcgttaatgctagctttatctgtgcaatcaaccacaaatgtttactcatctcgctacaagtttttgcaacgacgagatcatcctgctcaaccgtagtttcttccaataatcccaaaatggccgagtctaatccagcaaatccccaatcctgatcaactcgtctagttatgaaaaaacaagctaaaacgtctgttccagagtctagcttggattcaagaactgaacctgatcggtagtatggactgtatcatgcgattgactcccagcatcaatcaagctataatgctatatcctcctgctagggccacaaggcattttgtacctcagatagacgtttggttccgcgttcctgcatagcatgacctaggaaactgaaaacatctagtactgacatgaacggtcggtaaccaaattcctaaactccatcaaccatcctacccttgtgtaagggatttagttggtcctgcataaaagaaaaatgatgtaattacatcgtcaatcgaacagttcataggcaaaaaagtttagtaaaattatcagacatgaacataagacaaactagaatcttggtgcttcgatcgctccggtttttttgacgtgctacttactattaccattcatggaacataattttttttctttttgcatgctgttgcttgaaaattacgaatgcccttgaagatgatggtgtacaccaatacaccatacaaaaaccaaattacttcatccccaaaaggtgccaaatcgaagtctccaatgagttttttgcaccatgtatgaaagttcaaaattttcaacatgatgaaatgcacttccaaatgctgtttggcgacaaggacacccaatatttagtagagacaaattgatcaagtacctttctcacagattctccagatgccttgcattcctaaggaggccagttgaaaacaaagccatttctcacaccagctgcagtcgagcattacactgcattgttgctctatcagtgtacaaagtgacagtgtcttcttctctggtattgatggatcaaattcagtgacctctagaaccagccgtgta

SEQ ID NO: 50134 - DNA, 3591 bp, Oryza sativa
aagagatgggccgagcggaattcggcccatcgaacccgggggaggcaaactagacttttgcggagggattcgatttggaaggaattggattcggaattgaactcgacgatagatcggggattgagatcttgagatggcacggacactagacaacaagcaaagaaacaaatttcgcaattagggtttttaagagataattttcccgctaggcgccacgacggaacgggtgctacagggatttagttggtcctgcataaaagaaaaatgatgtaattacatcttcaatcaagcagttcatacgcaaaaaacttcggtaaaatcatcagacatgaacataaaataaactttttttttgaatggaaacataagataaactagaatcttggtgcttaggtcgctccagttttttttttgacgatttacttactattacgcactcatggaaaataagattcttttttcttttcgcttgctttcaatgtgattgaaaattacgaatgcccttgaagacgatggtgtacaccaatacaccatacaaaaaccaaattactttctccccaaaaggtgccaacttgaagtctctgttataaaaccggcccccaaatcacatcggaaaccaaacgcggaagaaacgccatagaagatccaaatacgatgacgacactgaggcacgatatttgataacgaagttctgccgaggcctacatctctgggtcactgattgcgggcgttcctccccgatctagcatattacagcgtatcagagttacaacgactcacggctggtcactgccggcagccgctccctctcgctgtgctaagtcgccatgcggttacaagaggcacgcccctctatttatgagagatcctaggatatagtccgactcatactctattcctatacctagtacaactctaagtcctaaactgtaaccgattttgtacacatgttcgacacaaactctaacactaatgctagtttcagcctctatatatacggagtagtacattctttctgctcaattgctgcatccttgccccttcatttgcacacactcacactaacatagaaaatgaagctgcatgaatagaacaatatagcgaaggaaatgatagagagctttgtgttaatttttgggactggaaggcatcaggagcattcctatgagaaatgtacgtgataattactctaaaaaactgctatcgcatcgactctttcacgagtgcgcatggtacatatataccatgtgggaagaatgtacctctattaaaatcagtggcggaggatggaaaaaaatctagatatggcggtgtgacccatggactagcgcgaagccccagatcagacataatggctgtgtttagttggatccaaagtttgaattttggttgaaattggagatcatgtgactgaaaagttgtgtgtgtatgacaggttgatgtaatggaaaaggactgaagtttggatccaaactttggatctaaacacagccaatgtaatctgggttgaacttagttataccttcaaaattctcttcaacacgttcttccccaagctcttggacaacatgctcctccatctgcccctcctccttctccatctatactgcaacattttggcttccatgagtacttgggcatgcactacaagagccccaggtccaataactcttcaaatatgcaaaacaaatgaaacaaatgctaaaatgttctaaaattgtcagcatttgaagaatatgtacctctttgtgaagacaatgcttttccttttctctttctatccatttgaacttttgaagaatatgtatcctctctcggtctctcctctgcctgcctcactggctctgtggctcactgcttgttgccggctgccctgctgcgctggccgcctgcctcccgcggccgcgccgcagcacgcccacgccgccgcgccgctgcctggccctggccggctagctgctgcctgcctcccagcgtggccgcgcacccgcctaccccgccagctgccgagcccccaccggccatcgcagctccctgtcgcagagtcacagtgtagtcgtcggccgtcggcgcttgcctcctcagtcggatgcccggattggattggggaatgggggatggggaattttggagttagggtttcatgttcaacaggtgaaaaggcccatttacaccaaaaaaaagcctaattggttggcctgttcgcacgtgggctgtgggcaggattggcttcggcaatcggcagttggatgcctcgccgccggctcggagcgatgccgccatcgccatgtgagtcaccgccctgggacctgggattcgctgcaggaggggggggggtccggcgggagatcaaggtatggcgagcgccataccgactcctccgcccctgattaaaatgttagaccatgagatctaagcacttaagagaaattcgttagtttgacactaattaatcagttgaaaggatgtggatccgaagcagaccatcatgcattttctgactaggaaaaattatcaattgattaagagttttgcagcaaaatataaatatttaatcagatttgttcttttttaccaatgttctgtgaatacaaatttcaaaattttcatccaggcaaactactgatcatctaattaatattgttttctccgcaggaagaacgaaatatctcatggacttgcacaggtgcatcagtcaatagcacaacttgtggagtaggccggacagaacgcatcctggtccacatcagggtggtgtggttggccggtggaagagacagcagccgtcgaggacgcgatcgcaaattacacgtttttttatacccgatagcaaattcacaggaaataataaaataacgtccgagtgtctaggagctaattacacgttttttttatgcccgatagcaaattctcatttttgcggtgtccatgagctaattacacgttttttcgatgcactgtagcaaattttgctaaaaaaatttaaatttgatgaaaattcaagcgttattatcgaaataactttttttttctgtaaggccttgtttgatcatggtagaattgcccgttgtgttgctcgatgatcgcgtgcaaccacgtcaccctgctgtccaggggcaaagctatgtagtccccaggtgttcctaggaacccgactaggaaagtaaaattagtgattaataccccctaatgactatgtgggcacccccttggctcacgtatgtgtacccccagaccgagaattaagccacgaagacgtaaagtccagtgcgtgcattgcagatcaccaggccgaacaggtgctactaggaaggcttcaatgcactaatgtgttcataacaaggctcctgatggattagatcatactcccgaaaattgcggactatttgtcaatgctgtataggtgattttttgggatttttttttataaaagaagtggccgatagaacaagccaacagtgtgaaaggaatatatataaatatccaggtttgccttagtgtttaacaagcattaaaaaaattaaatgtagagtcataaatagtagaagataatgtatgatgtatctatttgacgtgaatagttcataacct

SEQ ID NO: 50135 - DNA, 537 bp, Oryza sativa
attgccattgcataaaactgatcactacattaccaaaatgaggatgacacttttcaccaaaactgaagttgaaccttttatgcctttcacatatactacatggccagagacgaaggccagtgtatcagctgattgaacaataccctaaggaggcatttgcacatgacactgtgtaaaacaagagatcagatttcaccatggttgactcgacgaacaactaactgaatgtcattcctgatgagcaatttaaataccttctccaccatgaaagaaggctctccgctctccggaggacgacagccaatgacagaggacattgagtcctcgtcaattatataaggcccccactcagcgaaagcatagacaatatatatgtacgtaaacaccgattcagcagttcacccactatctcccattgtctccaacatttacaatggtgaaagaaatagacgatactagggtgccttactcgactctgcttacctatgtccatgcttgcactgcctcacttgcactgatcgaggacctggctgatcc

SEQ ID NO: 50136 - DNA, 583 bp, Oryza sativa
tcctgcagcccgtgtgtactataggagtaggtgttctaaatagtatattgctggatgcggatctacttgatgaacacacagatgacaagttcgatctaatccattccattaaaccatggggacaatcgacgcatttgtctgagacaacattctatttattatcttgccgatggtccttagcatgtatgtagattcttctttatgatactgaataggcatgatgaggaaaccttacgtacatctgatctatcatatgataaaaacctcctactcgttctggatgccaaatcctgaacattaggaggtatcttttcatatgtacattagacagtccgttagtgttctgcttgctccatcatgaacatgattcaatcaatggctctctgctgaatgactaccacaaaataaatcgtattatggaacatgatgaacaaccgttggaccgtgtttatgatcatatggagaggaaactacagtgatccacttatgcttgtgattccaagactcttatcctcatgaaatagattacttctatccccactagatagattgcctgcgtgtgaatgaattcaactactacact

SEQ ID NO: 50137 - DNA, 596 bp, Oryza sativa
gggcatggcggggtgatgccgactacctgttcacagtgatgcatcctcagagagctttcattgtttttttttcccaaattttcccttttttttttcgcaattgggggccaaaggggggggaacggaaagggaaattgcttcgatggccctctataacacaacactctgatcactgatcagtacagaatggactaacattccacaaaactgataaaaaaaatcattctgattcaccatcactgccagtgccaaatcccagtatagaagcagaatcatagtcttttttctttttgtgagaactaagcagaataatagtcacgatctgctttcttggatagagtaacttgtttgctgccttgctgagtgctcacaggcataagcataactgacacatggatcagttgttagtgaccagcaaacactgtgcaaaatcttgcaacaggaacatagagatagaactgctgcgcagcacatcacctgcaattagaagaaactgggtctgagattaaccatgcctacacgttatgaactcatgatgtacacctaacaataaaattcattggtttccctgatccttgtgggaacaaaggggtaca

SEQ ID NO: 50138 - DNA, 603 bp, Oryza sativa
  unsure (1)..(603): unsure at all n locations
ccttatatggggctgtacaatctaccatctcatctcgaactgtctaagatgggcaagacaaaattaagaattaagagagcactccatcaaacgccaaggatctgaaactaatacatacatatacacatgcataattgcgtaatcaattggcatgcatgatcagtcacttgaaatcaagatataagaccatgatatcaatcgtacacacaggtcagctcatgcatctaccataatctaacctctcctaatcagatcaagatagaaaaccatgacaacaattgtatatgcatgcatttatgtcagcagtcagcactaccatgcatcagaaaaaggtggcaaacagtacatgaaacaaactagctaggctgtcaataatttttttcagagaagttgctcaccaagtgactgcatgcagatgtgtaatcaaccagagaactattagtacacactatatacacaggttttgctcactttaactggccaanaanaatttntcaatttggggnaaaacccacaaaggnccgggttttccccaaaaccccccacaagcgaaaaataaaatgcatgcaatatgtattaagcataactactcatcaaactaat

SEQ ID NO: 50139 - DNA, 513 bp, Oryza sativa
tattgtctgatcgttatccggccaaatttgaagcttcgttgttagatgtgattttactctgacctctgtagactatcttcgatcatatcacttggttcataactgggaatagctcccacgaacaagcaactcagattcactttctttatgttcagtttactttccgctattctcttcatgttgtcatcatttagcattcaacgtattcctgtgcaccttcagccttgatgtgttctttcccattggatcatctcccaagacatggcgtcgcctggtaaccggggcttgcacttttcactccgtgtagcgtctgataccgagttgaagatttcactccttgccttcatagaaacacttttacctaggtcatcttgcttacttaatgacaaggtgactgttgtggggcaattacaattaggggtctttcttgagcgatgcagagcatgttttttgttatcaatcacctttcgggctacttctttgatgctagagaacatctttgccaatctcttt

SEQ ID NO: 50140 - DNA, 1137 bp, Oryza sativa
gcttcggaagatccgctcttcgtggaagttgaagccggcgtttgggaaagcgagcaaggcaagtcacgtcacccttgagcatattgaatcccagtttataaaattattttgatttaaattattgcattatcgctttgtttaaattcccgcgttatcactgttttatttagccatgcctatttacctttgttatgaccttattattattgttattgttattattaccttgttcaccctagaataaacaaaactccaactagtgggtactctattcgtggttccactagtataaatttaggtagatgcttcgctgaataattaggcaaccttaggtggttttataactttagactttgggaattctcatatcatttggacactatggaattgttggattatggtggaattggacatacacctctctttctctttcaaaacccctaaaacctgttttcggtggggtttgggtgcatgccagttatgggaagtagcaccccggccactataaggattaagctcgggcctctgttgcaaagcactaccgtactaaccacatgtctaatgggtaaggcttaactcggtgctcagtctagtcctgaacaaaaggacacggatagagatggatgaagtcgttgcgacgatggatatctctgaggcaaatgaaggctacgcgagctgcggctcggtaatcgagatgtctaggcaaatgaagactacacgggtcggtgcccgttagtcgagatgccatggcactggactagtacgcgggtggtctcacccctatgtgtgtggcgcacccggtctagatcttgttgctaggggctcaaccctggcctgcctgtcccgggataccggccgtaggcagggttgggtcggtacttttgttcacggctaggatgggtgaagggttatgtcacatctttacgacgggttccaaggccatggaatgcggagtaaagatgtgtcttgtgggtaaagatgtacacctctgatcagagtaaatctattcgaatagccgagccctcggatatgggcaagccgagcaatgtacccaagtcagtgttttaattcttaaaatttgctcaacaactaaaatatggaatggttggcctgggttggcttgggacgagctggaac

SEQ ID NO: 50141 - DNA, 807 bp, Oryza sativa
acgatggtcaatcgtgattggttaattaattaatgtgccaactaaaacctggtaatggtgggttgtgagcacatggttttgatggtcgtgctcatgacaattaaggaccggttcacgagtttcggttgtgaaacattaaccgtgccaaccacaagccagcatgggcaacggctttatcttttgtatagcatggttcattgcgggtgtcgcgtcccaaaacgactctaaaatacatcctcgaaattatgcctagaataattaaaatccatgtgaaagcctccaacaattaaaatgtgcaaagttaaaagtcaaataaggcttggaggatttttgtatatttcctaaaagcctaaaatgtgtaaataaattttagtggaattttcagagcacaaataataattaagaagaaataaacaaagttaaaatggttttataaaaagaaaagccctaaaaagtctttttccccccccccctccccctcttgggccggctcggcccagccccctccctctctctcctctcccccgcgggcccatccggccttcccccgcgcgcgcgccgctgacgggcgggcccgcccgccaccctcgctgacgggtggggcccacccgtcatcccctacctcgcgccgctcccgccgcctcgcccgtgccctagcgccgccgccgccgcgaatcccgccgcctcccgccgtccccgcgcgcaataaagagggggaaatcactccccgtgattccctctccctttccccccatttttccctctctctctctctcgttcaacgggcggatttgctcccgcaaatct

SEQ ID NO: 50142 - DNA, 1518 bp, Oryza sativa
ggtggcacggttaggccgagatagcgatcaagatgataagggttagacatggctaggggaggggttctagagcatctacgaggtatttagagggattccgacagcttgccgacctttggcaaggtgcggagaatagttgccgacgagcgcctccataggcgacggccgtgttcacgtcggcagctcagagggtgatgtgttagtgcaaagggattgctaaaatagaatttaggtagtatgtagatggttgaaacggaagaactcactgaaatcggttgaaacgacggattgcggccggaaaaacttcgcggcggtgaagaacagagcagcgcgggggcggcgatgctcggcttgatgcggcgaggtaaaactcgacgcagagctttggttagggcttagtatgctagaacatggctgatataaggtgttctatgaggtatttagggcggaggatgtattgtttatggtgaagtcgatcgcgcacaaggtgttcgaccgacgggcgagggtggttggtgagatgggttgatgaaacacagcttcgggttgtggggctatggtcgtggatgatcgatgatggacagggaagggattggggtcctatttatagggctaggagaagcggatgagctcgggcaccgtcatcgtcatggatgagcttgagctttggatatggttagggcggcagaggctgaaagagggcgggcaagatcgatttgagtggcgggaggccacgttcgaatacttaccggcgaaggattgacttgaccgcgggtggaaatcgctggcgacgtgttggcgccaatccgagcatgacgcgcggcggcggcgagggtgaaaacagccggcatgggggtgaatggtttgaattgagggaggggataccaccgtctatcttcaatctaaccgtgcggcaagaattggcgcgatttatcccgggtagaaacgaaatcgcacccgacggcggcttggacgggagtgtacggcgtcgagcagtgatttcatgcggcggtcgtcgtcccggctttgtcgtcgtcgagattggtgcggcgacggtgggttgaaggcgttggacgggcggcagcgcgccaaggcggttgggcacgcgcgatcgatcccgagaccgacgcgcggcggctcggcgcgcggcaaagtcggctgccagtcggcgcgcgtgaaagggaggaagaggtaaaaagaaccacggttttgagtgggatgtggtcccctaggaccaattctaaactttgcataagattgggttggagttgggctgctctagctgggctgggcattctgtcgagcaccttgagtgcaatgaacagtagatttcaagaattttgaatatttccctagaaaagatttgaattcaaactaggagtttggaagggtttcactagggtttaaagtatggcaaatccttactaacattagggtgaactaagaaaataatctatggtttgaatttgagagaatttgctcaaattcactagggtttagaataaagggaataaattg

SEQ ID NO: 50143 - DNA, 1390 bp, Oryza sativa
gtttgtgtcatgctaggtaagacaagctagttctctttgttgaaatgatgaatagttgctctattctatatctcttatatatgggctcatatgtaagtgctctctcaaaaattaaatatgagtagccaacaattatctgggaacctgaggtaaatgagctgcatttgctaatctgagtctaagtgtttccaagatatgagatggtaaataagaggtgctatgattctagtcctcgtttgacttgaatcccggatattctgtttttaaaattttaaatttgaaagtatctcatgtgatataaattcccacaaaaaccaaaaatgtgacatcattgatgtaaccatatacattttggttacttgctattccattgaactttgtcaaatttttgtgacttgtgtcatacttctcatgctctatgatcaagatcatacacccaggtatatgcacatgctaaactcctacactgggagctagcaattatccattccatttccatactaccaccaaaataaattctccatgcttttatgcgctttcttctcctaaaaagaaaatcctttttgaaaaaccaagaagagaaagaagaagggagggaaaggcatggttatgaaaaaaaatatataaagttatgctctctcaagcataagcatgataaagaaaaaaagaaggaaaaagccatgccctctccttattaataaaagaaggatttttgggagaaggaagtaagcacaaaggagaagcattttctttactttttcttcatattcgactttcaccatatatcacacactttgcacgatcttgatcttgagtatgtttagtcatctattttactctaagtttttgacttagtaataaatgtaaatgcaagtatgctatgtttgatctcttccgagctccatatatcaaaccttagagtaggaatcaaaccggcaaaaaaaaatggtgaggaattcatattgatacacttagagagactgagtgaatcatttgagaaacttggcttttcttttataaaatcatttgaaaacttccggaataaaagttgaataaagattggatgattggtgctctaattgctgttctgtctttcaaccacccaaggcaaggagaagcagtgtctcgtgggaatcaggggtaagggtaagccaccatgccaaagattatttaatttgagagagagtacaaataccttgcacctgtacatttgagatatacagcatagtagcaactcttgatcaataaccaagtctttgtttcctttcgtcctttactcgggacgagcaaaggttcaagtttggggggttttgttgacggtcgttagcgatcaatttcgaccgtcaatattatcaaaataaaggagaactagttatgcttgcactgcata

SEQ ID NO: 50144 - DNA, 4268 bp, Oryza sativa
ctgagggcagcctcctccctttagtctcgatacgccctgacctatatcaccaataataaccggggcagcccgaaccccaagcacggagggggcggctgctgctctaccccgggcccgactccctcgggggaatgccacatgggtactgagggcagcctcctccctttagtctcgatacgccctagcctatattaccgatagtaacccccggcgttaaccctagccgaacccttccatgagtggccaggtttgacgccattcttctgatccagtgacatgtgtgcctagtattttttgagtcatgacacatttccgcgatcgcggcccagcgcgcagtggaaaaccgcatccctggcaatgatgggccgtcacctcgcaattgccacatcgcctggggtggcgcgcggagcggatgcgtcagtggcttcgctagcgaataatgatggcgattctgtcgtaggctctctaaccttccattatatttgagagatgatgtgaataattcaaatcatcatacaaacataatgaaacatctgacgcctcgagagaagaatattagagacattgctgggcctttagcctgccagtcaactttagcctgagatgtacccgtcaatccactcgaaggtggcgaccagatgtgttacacattcaggagagctgacaaaaatggctaaagatctacaaacatctcaaatattttttaactcatactcatgtgaatctagttgccaggatgtgcactagattcacactttcatcttaagcatggacatacatagcaaacacaattaagatgaaaggaacttaaggacttacaacaactaaatagatacataggccgaccggcaaatagacataaatatagaacaacggaagcttgactacccaaatacaagcacaccgactaggggtataccccatcaagttctcatcctagaagaagcaatcgaaacatgcatcactcaaagactaagtctaaatcctgcaagcaaaagtttattccaacagcaagagttagtatattaatcaaattaatgtattggcaagcacaagacaatcctaacatactacatataaggcatatattcaaaggaaggcattatgtagtttattttcggcataaagaggttttgtttcacaaatcttttgtaatggagtggcaattcaactatcaaaaacaagttttaacttttatcattaagttcatcataattccatcataatcaatctcttgttgtcatccttgacaacaagtcataatatatcaccacactcacagaactcaacacattttatcaatttcaaaccaagttacatgttctcattttaaaacatagtctatactcataacacttcaccaaagcgctcatgaccgtgagcatggctaatcgattagtttagagaattccgcagagtttgtacagctttacccacatgatctgaatcgctctagtttggtcggtacccgtcggtaccaccatactatacgcattaagtacattctagaggtcacaacgaagccttcacactacttagaatctagccttgcaccagcacgatacgtgttcctccatcctagacattcttggaatatgtctagaaccgctaagtagcaggcccacgccttaaactaccacgatgggaacccaccacgtggcacaataccgttgtattggacatgtttagtcacctaaactaccactttggggtaaataggaagctcctctgaattattccaactcatacacaccggcctaccagaatgcaaggctagttctaaatagattaatcagcttagtccatcccatactagcacatgtggatgtacgaataactttaagttggtgacacaagttcagtccttacggactcgggcaaacactccccctatcggtatgcaactaacatcatatgcacaccacttgccgcccaagtctaaaatcacattttacttattttagttcacaaatacctatcatattcattttattccagcaaaggttcatgcgtcaaaatcatattttaattatagatggaatgagcatttgcatgtttctaagcatggctaagcaagtagttggacatagagcatatataaacctatttgagcacaaagagtgtactctaaccatttctaggggtttaagcagcaaggatcacaattattgaaggtagggtatgcagcagataggtcataactaccttatcccaattttaaatatcggtatagtttaagttcatatgcaactttgcaaacaaatattttcattcctcaaatcatgggattcaatgtgttcaaaggatgggaggagaacttgccttgatattgagaaatgtttgcacctaatccattccttcaccgcttatgcaattatctaaataaaatacacgttatgcaattaaacaccgaaatagtcaaaaatctaaaatgctctaaaatgtatgatttgtgcataataagtaggtactgatctaaaatgaacttaggtgaaagaatttccattttgtctcattccatttgagagttatgaattttagaagttatgtcggtatgtagtagtgtttaattaggcagtgttataaaatgtttctataaattgattttaattaaatttgacttcacagaggtgaagagatgagttttctaagactagaacatttggtttcacaatttttagagtttctatgaatttctaatgtattttagaagttacaactttttatagctgtatagtgttatataggttcatggctttagaggtttaggtccagaacttgtttcatcttgctagtgatgtttaaaatgaatgatttagtctactaatcaaattttagttcacaaactttgagttgatattactctactacacattttgtaacttagggaatgttctatgttaatgactttacatattaacctagagttttgttacacaagctatgttcatctaggttttagtgaatgaggatgaatttatagcttttctggtctaacaaattttagttaggtttaattagagctagactacatctatatatatacatacctatgttttgcttaatcaacactatatgattagcaccaattttatccaattaaggttcagagctataatttgtacaaaaagtgccacattttactttactaaatttaagttcactctttttctgactccatagaaacttggttcactctttctggactaaggatgaattttctataagttgtacaaattaaaggctaccccaagttggttatttccttatataaatatttagatgtttttattatacagaaagtttatatttttattttacaacttggaaatacatgttttggtgactctacagaacttgagtttactcaaagaggagttaagatgaattttatatgaacttctaaagtttaacttatctaaaacttattattttaaagataatagttttaaaggctttggaaaagaagtaattatatacttttatttctcctaatcagagagtgtaagttgatgaatctgtggaacttaagtttgttcaaaactaagttgagatgaattttatatgcattttataaatttctatattaaatttaataactttatgaatctacagaagtttgaatcatctcaaaatgagctatatttaattttatatggattttacaagtttaggtgttttcttgatatcaaattattagtttgtgtatttcttttatcctttttccagtttttaaatagttgggtccacaagtcagtgagagactaatatgcaggaaggcccttgaggtttcaaggaatcaatctgcagtccaaaatgtgcgatgaaccaaattcattaagagtcctcagattcttttaattcattactaattagtccgttgtcccacatgtaagtctaacatattttacattttaaaccttacaagatttaaactttctctaaatgaggttctcagtgcctaatgacatggggcccgctcgtcagtgagacggtggccggcggacagagcagcggcggctcggcgagtttctcgccggcgccggcgatgaacggcggcccatgtcggtgtgcatccaaaagagaaaaggtagcctacataaatgcgaacccgacggtatcctttttgcgagctgcagtggtcagaatcgatggcaatggcggcgcgagcggcggcagtcctcggggtgacgatgcaggttgatttagaggtcagatctaggtgaatggagtgcatgcatgtaactaataggtctccaggatgctca

SEQ ID NO: 50145 - DNA, 3576 bp, Oryza sativa
gcccccccccccccccccccccggtcggtcgccgtcgccgccccgggtaggaagagagccaagagaggaagagaaagaaaaagaaagcgaaaagagaagagagaaaagaaagagagaaaaagaaagaaaagaaaataggaaagaagaaaaggaaaaataaaagagaaattaggggagagattaggaggatttaggaaataaaaatggttggggtttaatcgtagattatttttggaaattcctagagtgtaatagtatttcgatcggaattccgggttaattataggaatatatttctcgatcggattttattagaattggtggtagtgaagtatttgtaatttcatgaaatattttaggatgtataaatcgaaattcgatttgcctatttcacgagtagtataattaatataaaagaatcgactttcgcattcgacttctatttggatttatttggatttttatttgaattctaaccgaattcaatcgaattttcgcacgtaattttagagcccgagggagttgcggatccgagcgaggaccaagacccgcaaagcttcgaacaaggcaagtcatcactattccttgaacatgttgatctcatttgcaaaattattttgtttacaaataaaattgcatgcaatgatgaacatcctacttgtgattatgccatgtcttgattattgtttacccttaaatcctataacaatgatttacgtataagtccctagacaactatgacaaatgcttagaaatgctactctagatttatgcatactcatatttatcaaatgctatgtgcttgggcaattacctttgggaaggtaattgagatgcggcatgtggagacatgagcgccacattgccataatattaatgacatgatttgtgaaaggaaaataaaactaaacaaatgttttcgactggggcggatggaggatttgggtggtatccggaaaaggctagtgccgtccctggtcaattaaggaccgagccatgaagttaagcctgaaacgactcccgtacaaccgtacttctcgaatgggtatagacctagcggattagatagccgagcggaggcagtatccatgcatagtggtttctcattgagtgaggcaggtgcgctacggtgggacagccgttgaggtagggccgcgaggcgtgccctacatcggtgtcgccattggtaggactgccatgagtgtgcgagaaaaaacttaactttaaaccacaacttaatatgtgtgtgagacttcttcccccgggagcgccagaactcctcacactgctagaaacatggacgcctagagtgtatgaggatgtaaagttcatggagcgggtactgccaatgcgaggttatcgaaaggctttgccgtgacgcgtctcatgtgttgggacgaggctcatgtgttgggcagtcgcggagtgcgggtaagtgtacatccactgcaatgtgagtaaaccaaatctattcgaatagctgtgctcgcagttattgagcaccgggacatgtattacacttggctagactctaaattcttaactgtgtgggatgagatactgcatgaagattttttttatgctgatggagccacttcctaagaggagggaaggtggacgtcctcagaaaaccatgacgactcaatggcgggaagctatccttgggatcacaatggatggtggacagaactgtcgttgtctaatgtgaacattggtattaaaacttgatcagtctatgataggtcttaggcttgtgaaaagaattacaaaacttgctttgcgcaaaagaaccatagccattctttgaataccctctatcatgtgcattgttgctgtggtgacttgctgagtacggttggtactcaccctttcaatatacaaactgaatcagaggtaggagttgaagcttcggaggatccctacgcttactaccaggagggtgatgaagtcgatggcgctcagtaggtcttagttacggtcgttggctgtggcaatggcgtgccgctgctttaactccgctgccttatctacttctacttttggaatgtattccggaccgttcggtcctatgttctaagactatgcctgcgggcctatgatgtaataattcgcactagactctcgtgtatgtgcacttggtatttcagctatgaactcgtgagtaccagactacttgatccagggaaatggtactgtttacacgattgattcctgttataaaaacgggggtccacatacatataccttgcacctatatctttgagatatgcagcatagtagcaactcctgatcaacaaccaagtcttttgtttcctttcgtcctttactcaggacgagcaaaggttcaagcttggggggttttgttgacggtcgttatcgatcagtttcaaccgtcaatactaccaaaacagaggagaactagtgatgcttgcaatgcataaatatgttagaatataaatattccactagtattaggtatactaacattttgtagagaatgacaaaaaaatggaggagaatcgacatcaactcaaacgataaatcaatcggacgatgtcaagaatcagacttatgtatgaatggggcacgaagtcagaattgacatgatgaattgggccaaaattcacaagtctgcagagaaggatcacagaggtggccgccagccaaaattgggctggattgggccggccccaggttcggccgaacctccctcatcgccgctggatgcagggtttcttctggacggtgtggattagcttccaatgatggttggagggtattttcgacattacaactgtcacaaccgtcattgggaggctatataaacccctcaccttctcacttcactcacacaccttaagcaatagctctctcatttctctcaagtttagtttagtagtatctagctggtggaaaagaaatagagtagaaatcaggagtccggaagccttcggaagagttcgggtatggctctagtagcttttctcttctcttttgtaagctttgtagttttaatagaatactcttctaaatacatttatggtattgaaatacttttcgagtatatgagtacctagtttacattatgttcatgttatactaaatatacggctagcttatctgggagatgctttggtgcttatacaattactctatgtcatgacgatgatattagagtagtatctgctagtttagacgtggtgtctagattacgggatatcattatttggggttatatattgcggatgagaggtgggccgttgatggtgacagctcagtatgggtattcctccgcgccggtatataatcctaagttaattccctggggagggtatttctccgtatttagccccggttgtatggtcatgacgggctgtcgtaaggaactcggcagtcaggggtggcttctcgaagtaccaggaggacatcggatagagggtattagctagtatatcgggtaactagtgtcacaccctaaaaattcaaaatatataaattgtggtttaaaatggaattttagaattaattttaaaagcctagaagagaagatctaatttaattaataaattccaatat

SEQ ID NO: 50146 - DNA, 3064 bp, Oryza sativa
aagggattgtgtgaccccaagcagtcgctatgattttggatagccaggacaagatgatgatgagccaataattacacaaagttagcactagtgctgaccataagaatttgatgagatagtttcagctatatctttgtagcatcagtctactattcagagttgaggtattgattagtgcttgaccatcaagcaggtggtactttcccagtttcacatgttcaaaaacagacgtgtcaacaaatgccagcttacagtgagaaccggtcaacctgaacatgtttaacaactgtaaatgatcttgttagggatttaccaattcgagtaatcctccaatattaatgggtacaaatatagaacgattccatgcactggtggagaaatactttttagtcacggttcgcaaccccctgtagtcccggttatctttagtcccggttcaaatacccgggactaaaaatagatctttagtcccggttagtaacaccaaccgggactaaagagaggggatctttagtcccggtacaccaaccgggactaaagagagggttgcggcagtgagatgatcccctttttctttttttttcttttttattttctcccaaatcaagtgggatacatatcccaaatcaaacccccaatccacaaatcgaagtaacatctcaaatctacatcacaaatcaaagttacttatacacacaaataaatacatcacaaatcaaatacatcacaatatcctaagaaattactcaaatacatcacagatccaaacaatgaatcacaaatttgtaacttctcagtcaaatacatctcagtgaatcatcacaaattaaaaaaaaaagaatgccgttgccaccgccagtcgccacgaacgacgggcgcggccccaccggccgccgggcgcggcctcgccgcccgccgcccgccgccctccgccgggcgcgaccccgccgggcaccgccccatcgcccgccgccggccgggaaggggaggaggaaggggagagaagggggaggagaggaggaaggggaggagttggagaagagagttatagaggatagatctgaggatagagggtgagattcgatctgttaagttgtaattgtggatgagaggataagggatagggattatatactacgtgtttaattttagtcccgattggtactatcaacctcttgatctttagtcccgattggtgttaccaaccgggactaaagatcaaaatttttataaccgggactaaaaacaatctttactcccggttctttttggatccgagactatcgtggattttgccggaccgagcaaagatggttcctccaccagtgatgtcattccttgaataagaaacacatgaggaacaatgattcaactaaagtactccagcattaggaaatttcaagttactatttgcatgatgaatcttttttgctctgctgtggaaacagcaacatacagacttatcaactaattttggaagaacgagaaagaatcaatctggtttggtggggaagatcagctccggcatcgtagggcacaggacaagactgtgttgcagaggttggagacgtcccgtggcttcacttatggactaggccaaagagatgtaagttgagtggagggaggtagcggactgagctagggctaaaaagaaaggaaggaataagctttcaaccccaaaacaaagcaaagatttaatgtttcaatttaggaaagattttcacatcttatactacacccttcgttctaaaatatgagagattttggacggatgagacactttctagtacaatgaatctggacagagagcaaattcagatttattatattaggaagtgtcccatccgtctaaaatctggagattttgatgtcccatccgtctaaaatgtcttaggacggagtattagattgtactcactactggattgtttttattttggtatgaagtacagcctacaggcgagggtgtgtttggttgcatgcatgaaacctggctcgcacgcgtggatgcagtaggtcgctgtttggttgcctgcagctcgctcccagcctggtcgagcggatgcaaaaaatcccccacagccaggctgagcagaaacgctcaagttgagcttcgctactcggccaggcccgcacgatgcaacgcgctgcatccgcgcatgcagcgccccgcacccgcgtgtgcaagggcaagcgatggggtcaccactccgccccttgctcctcgtcattttcccccagcaatcgacatggcgaagacgagctctgctagagggagtggcgcccgacgaatccaacttgctgctgcatccccctcctcttcccaccgtctcccaccttcaatatccggccaccgccttgcccacacgtccccgctgatggtgtgagcactgccagatccaactagtggtgaggcggcaaaaagcttgacggtgacgagctcagcggaggtcgcggcgacgaggacggcggatccaccttgctgccgcatccctcctcttcccatcgtatcccatcttcaatcgtcggccaccgtcgtatcccaccttcttctgtgccggtcagatctggagcagaggagcggcaagcggcggatggagaggagcgcaggaagatgggtggaggaacggcgagcggcgggcaggtgggcatgcatgcggctgcgggcggacgggagttgatgacgacgaagcgacggctgcaacgccgatccccttcctttctctctttcgtttcttttttctccccgggttttctgttttctttttctttcgtttctcactagcaagtactccagcaacagagaagtcaatgtatgcagaattactactaatagattaattagttccactggttcatctagcttaaagaaaaactagcatggtggcccgcacagattgcgcggctagcattattatattttctctcacgtaataacatatatgttttcttattatattattcaaatatattaaaataacatcataattttaaattttacaataactttacgaaactacaaatgtgtaatattcatatggtattttatatttaatgcgagata

SEQ ID NO: 50147 - DNA, 5187 bp, Oryza sativa
actctatactctacttctaatattccttatttttaatttcgaatttcagttattttctaattgtatttctatacggactctatgctctacttctaatattccttatttttaacttcgaatttcagttatttcctaattgtatttctatacggactctatgctctacttctaatattccttatttttaacttcgaatttcagttatttcctaattgtatttctatacggactctatgctctacttctaatattccttatttttaattccgaatttcagttatttcctaattgtatttctatatggactctatactctacttctaatattccttatttttaattacgaatttaagttatttcctaattttttttctatatggattctatactctacttctaatattacttatttttaattctgaatttcagttatttcctaattgtatttctatatggattctatactctacttctaatattccttatttttttaattccgaatttcagttatttcctaattgtatttctatatggactctagtctcatcttctaatattccttattttttaattccgaatttcaactatttctaaattgtatttctatatggactctagtctcctcttctaatatttcttattttttttaattccaaatttcaactattttctaaattgtatttctacatggactctgatttttctttttctccgattaatgtgagaatttctaggccatgagagcgaacgtggaggcttatttttctattcctttaataatataatagatagataacctttttcttctttttcgtaccactgattcggtgtgaaaagttggccgacttattttatgtagataatagagtgattttgcagtatcattcgcatatgtaagtgaatattcaattggttaaatcaaaatactcttattatttgttatatatattggagaggtaacctcacccaactaaatgaagaggtaaacaacactcacatccatgcaaccaaacaaacaaaatccctttcaaaccgtatctctcatacagtaaccaaacaaaatctcatgctagcctggctagaccaatgcaaccaaccaaacaactgcatatgtatactcttagcaaggtcaaactcagcctggatgcgagaaatgagccaggctaggggaatatgggcaaccaaacacaccctaaagagatgcacttcacttcagaaaggatatatgattggttgcaagctgaccagttcaggcaacaacgacaacaaattgaacataagaaaaaaacgacaagaaatcgatctttggaattaaaattcttctagcttcagaaattggaacttcaaatttacaaaaaaaaaagaagaaattctactactattacgtgactctccatttccaacctaaaagtctcagaaaccctccacctatgggtcacacttacttttaattcgaatcagacattctgttaataacatcaagcttttaaaataaaatctcaaatatttaaataaaattggttgcagccaaacgatgctttttttcagcacaactatatacatattttggaggggctcataaaaagtaggatgtgctcccttcaaaaaaaaaaaagtaggttgtttggacacatgcatggagcattaaatgtggatgaaaaaaaccagttgcacagtttgcatataattgcaagacgaatcttttaagcctaattacgccatgatttaacaatgtagtgctacaataaacatttgctaatgatggattaattaggcttaaatagattcgtctcgcggtttacacacggaatctgtaatttgttttgttattagtctacgtttaatacttcaaatgtcagtggtggacgcaagattttgaagatgggggtacaaagttatcaaatcgttgttccataaagaaactgcttagtagtaggaaaagtaatgagcaagtttttcttgctacaacaaataaaaatagaaacattgcaaaatagctaaagatttgcgcgttcgtgaaaagaatagctaaagaaaaattaaatcttggagaagagatactatgttttcatcccaaacactccataaagatttttgcactaccatctaactctttttgactcctctaccatataaattcagatatgcacattaatcaaatttcctaaaagcaaccatcaattgaatcaaacatgaactacaggaagaatagttgggagcctaaaaaaatatatgatacgaacacattcaatccattgagccatgaggttgcttctccagtgcagcggcttgtcgatcagctgcttgttcttggcttctctccgtgaccacgagcagcgcctgcacacggctgcaattggttggttgttccaaaccataggaaggcatacgatatctcggtattctggttgtaagccccatatacaaaccagagattcaaggtcatgagacgagatcgatgagcttgaggagcttgtgttggtctgcctgagccgttttctatgagttgtattgtaattttaggctaaagaatagctgttttgccccaactaatgatatatatacaggtaatatacctattaatccaaagattatttgtcaaattttttggggtacagctgtaccctcatgtcccacactagattcgcccctgtcaaatgtgtgtccgtatacattaaaaatttttttttgccaaaacaactaaacacggccaattggttgcaagctacagctgacagtccaatcaccatgacgacacgaaatctattgattttcgaggcttcatgtcattttccttgtcggttggacacattacttggccaacctaggggataactaaatgtgataacctcttgtctctttcatatgtcgttttcatatgtcgttgttctttaatttgaaatcatcagtgaaaccgttaacttggatatttgtacatcctcgagccaaaaaagttctttttttccaaagaaaagtgtatgtagtcaacctatttggccttagttatttttaagaattttttttataaaaataatatacaaagtgtttcgttacaaatactttcatacaagttataagacttatttatatataaacggaaaagggaatttgttggtcaaaattgttttctgtttatttcgtgaaaatcctttcctgaccaacaaatggagcaatttttttgaagctcatgtgacgccgctcatctgcacgctttggttcgtttcaagctcacgtggcacgtgttgactgagtccaagtgcaaatataggctcaagaaagggcctttctgtaattgtgcttgtaatcttggactcttggtcctctttcatgacctgtttagcttttgcatattgggattgtgaaaccgacctgttgtatgatcatgatggtgacttcagttttgcaatgtcattcctggtcgaacaccctgaaagaagctgtaaaataaaaaacctgtatgtcgttgttgctgttaccacatgaaagcaaaaggaatcatcgttagttgtttactagtgtgtttcttattcaaggaatgatatggaagttggctactccgcaatttgtgcacgttaatactccaagatttcttgaaatggtaaattcctagcaaattcatttacagttttgcaattcatgttcaagttctggattgaaagctggcattggtagagagacttgagacatcacatatgttttcactcagcaattggacaaaaaaaaaaggtcaggtgaagttgcgaaaagcaccacctgcttgatggtcaaacatcaatcaccacctcaactccactctgtagacttgactgatgctaagatgataaagctaaaactgtctcaccaaattcatatggtcctcatcttgcacctacggatctccttcaccaccaatgtccatcatctgcccaaaaacgtccaaagaaaaacattcatattagtgcaaaccaagagaataaccaagtgctgtcagcatccaattaagtaatcagcagtcgtactcagtactgttctcagctaccacaaagtactgcgagagaacaaggcactctgcggttcatctctttttccaacaagaaccacaccaaaaaatacatcaaataaatgaaccagataaaatcatgttaatcttgtatcataagccaggcccaacgaaagttaggactttttggcacggctccaacctctagctcctagcttcttagcttgaccattgaagttgaagatgcattttctgaagttctttttgaggcaaagttttttttttttttttttttttttgaagtttgcaccataaagaacaggctcttaaaaaccagaacaaataagcattatatggttagccttgacttgcgaattctgccacaaggacaacaaacgattctcttgatgtattacgactccatcgcatctgaatcctcctgcaataacgcattcaaaagaaacaaatgaacaatgtgcatgaaaaaagtgccccaaaattcaaccatccttgcatgtccattggtttcaatcttaattgatgtgaaaatgaaagattctcctttgctttcaggttatccaaatctctaagcatttgcttgggcatgtgtatttggcacagcccctttggatgaacagttaaatgaattgaaagttccaaaaagggattggctttaatccctctgcatattgaaaattctaaagtagaatggtttcaccttaaatttaaataatttacccatgttttaaattatgaacctagaaccctttctctaccttatatcaggagtatcatgctaactgcatccctcaagtagaacaccaaagagtgccaaaggtcagcaaaaagggacaaatacagttgatgcgcactgctctctgtaagaggcagtaaaaaagcactggtacgtaaggcataaacgtcaatgataaactagctactcttagagataccatatactccctccgtcccaaaaaaataatcaacctataaagggatgtaacctcttataggacaatgtatctgaacataccctatgtccagatacattgtcaggttgattttttttttttgacagagggagtatgctataagttaagcaaaagatattcacttcattttgtacagtaaaattactgaaagtgcattgaggttaccagcgaggggtcataggcagttaggcacaactttgaccatctaccttcgca

SEQ ID NO: 50148 - DNA, 1035 bp, Oryza sativa
tgtcaactttgctctttttgccatgcagcttatatctgaaacaaaaacatatcagaaatgaactttagctgcaatgaagaaaatagtatcatgcacagggaaaaaattataacaatttaacggccatcaggagagattttaaatgttgtgctataatcaggtctcagtgtcagctatgaactgtgctctgtaattagatctacaatgatacaccagggaaagagctgaggaaccaaattgatgttggtatagcttcatcaaatgctatatcaaaacctgcattgtgtcaaagaagtgtttatacacatagcaaactcaggcgtggccacactaattttctcggatcacactaacagatgagatatgaagcctaaataaggccggagtacataacaattatgaagcataaataatttttcaggctctgttttagttgatgctccctcctaaatgctaaccttctacattcaagaagattgaaatggtcaaatattgtcccttccaaacgactaccaggatcacattttggagagtttgcatcaaattctttagcctactgcctgctaaactcctttttgctgggatggctgctgtcctaggagagaccatccaatggtattaagattacctagtgctaaactcctcaatttaacctagactaattctgtttgcttgggaagattttatcccaaccaggattaattaattcttccgatacagccatggatggcgctggatctggatcttgtttgctcctcaagacctcaaccctgtgttgcacataacacttgctgctggtagaacagcaagaacagaagcatatccaccttgcggaaagaaatcagaggacagaggaggagactggagaagctgacctggaacccttggcggcggcggcggcggcgcccgccatgatgccctcgccgccggcgtcctccaccgtctcgggttgggcggcgctctctcctcccacccccacgtcgccccgatctgtcacgaaccaacactatcacacctaatctctcacacacagtg

SEQ ID NO: 50149 - DNA, 5011 bp, Oryza sativa
aattccgactttcagctaatttaaatcgtattcctagttgaactctacttttcttttattttttaatttcgattttctattttttattttgaattttaattaatctcgtattgggtttttatatggactcttctttcaatattgcttaattttaatttcgaatttcagttatttttaaattgtattcctactcgaagtcctcttttttctttttctaatttcgaaatttattttatttttattctgatttttaattaatcacgtattgggttcctgtatagactcctctttcaatattgcatatttttaattccgaatttcagctattttttttattgtatttttatttagactcttcttttctttttctccgattaatgtgggaaattaatctcgtattgggttttatatgtactcttcttccaatattgcttaattgtaattccgaatttcagttatttttaaattgtattcctactcgaagtcctcttttttctttttctaatttcgaaatttattttatttttattccaaattttaattaatcacgtattgagttcctatatggactcctctttcaatattgcatatttttaattccgaatttcagctctttttttatttttattgtatttctatttgaactctttttttctttttctccgattaatgtgggaatttttaacctccacagcaaacgtgatgcctccttttcaaagctgttttaataatataatagatagatagatggcatgctttcaattttgtgtatagtaatggtatttttccaaacctgcaaatttataatggcatggatccaattaacccttttaaaagtggcaaaaataaaaagttaaatgtcacgggtacggggcatttcagtatccaaaagacagtcccgtcttgtgccctgcgatgctagagccgatcttctccaccaaatcagaatgaatctttctcgatctaccaaaattggttgagggtttttgatccactagattttctctctccatttttctcaaaattggagcgagtccacaaaatttgggataaaaatagccggggatgctagagccgatcttcaacaccaaatcagattaaatatttctcgatctaccaaaaattggttgagggtttttgatccactagattttctctctccatttttctcaaaattggagcaagtccacaaaattcaggataaaaacaaccggaggaagctcgccggcttgacatcattgaaatcaattaatctggcaactagacccgaattgagagagaaaatcatgggaaatttgataagggaggagtggggaatcgattatcacctcatcatcatcaacttgcccgtggttatccaaaatctgagtttgcttcgagtgtatcaggcaccatccctttgaatgaacaacaaaaatgaattaaaaaggctccacgaaggaattgactctaatcccttcctagaaagtcctaaagtggaatactttcacattacactttaatatgaaatattttatccattttgttccttttttaaattgtgaacctggaaccttttctctaccctatttaggtcaacaagacccccgtatcttaacaggcatctgtgatgtccaactgtataccctcaggcaaaagcaaaaagagataggaaagctataggttgcagttacaaatatagtgacgcggcagactgatgatacacatacaaagaaagttcttacaaaattttacaaacgctgatgtggcagacagtggttgaatcatgattttgcataactaataactgagcaaaacttaatcatctactttagcagtgtatttgctccatctagggtcaagggtttaaatggtttgagaattcaaaacattgtctcaaccatttagtcttgtcagatagtgtattatgccatagtgctttttagtttctgttatttgttatccaaagaataattcaatcaataatcaacacatacctctgattgtggagcccttctggatcttaatatctcgttgcactgttccatcaggcttctcgttccaaatggtctggaagactttgttggtcctgtaaagcattctaaaacagatctaatgaagattttgtacattccaccgtttttggttagagactttggatggtatgtataacagaccttggtatatgcagttctttaccataagttcagtatctgtctcatgttaatcattgatccacctgtcatagaattacaaagaggtcttatttcatttctaaaatcctcagtatggaagtaactggagaggcatattgcaactttctctcaacttacatatatcactggtttccttcgaggcaaattgtcaactttgctcttcttactgtgcagcttatacctgaaatacaaagaaacgtaccagatactatgaattgagctgtaataaaaaaaagatcatgtgtacagtgaaaagactatcagtaatcaagactcagtttcagctatgaactgtaattagatatacaatatatacaccagaagaactactgggcaatcaagtgatgctgctataggcttcatcaaatgatatattaaaacacatactatgtcaaagaagcgcgtacacagagcaaactcacgtcagaccctaattttctcttatcatacacagatgagatgaggaataaataaggctggagcatatgacaattgatatgaaaagaatgttatggaccagcaagaattcttcggattctgttttagcttatgttccctctgatccatcggatgcaatttggcgcacatgtgtaatcgcaaacaaacatggttgtattttctctcgagaattttatctccctctccttatcctattgaatttacttttactcgctcgcacttctcatggggtcccaatctcctatgccgttcacctcaggttaatgtatcttattagcttagccaagttacccattaagtctgtatgttgctgttcccacagcagagcaaaaaagattcatcatgcaaatagtaactagaaatttcctaatgctggagtactttagttaaatcattgttcctcatgagtttcttattcaaggaatgacatggaattgttctatatttgtacccattaatattggaggattactcgaattggtaaatccctaacaagatcatttacagttgttaaacatgttcaggttgacctgctctcactgtaagctggcatttgttgacacatctgtttttgaacatgtgaaactgtgaaagtaccacctgcttgatggtcaaacactcaaacaaatcaatacctcaactctgaatagtagactgatgctacaaagatatagctgaaactatctcatcaaattcttatggtcagcactagtgctaactttgtgtaattattgtctcatcatcatcttgtccctggctatccaaaatcatagtgactgcttggggtcacacaatccctttcgatgaatagaaaaatgaattaaaagctcatcccaagggattggctctaatacctgcctatagaaagtcctaaactggactacattcgccttacatttaagtaataaataattttatccatctgttaaattaagaacctagaccctttctctaccttatatcaggaattatatgattaagagtaggaacacatgtagttatagaccacttttcaatgatgtccagatgcatccaccagcaaaacatctaaagaatgccacagtttagcaaaaaggaataggaagttataggttccacttacaaatattgatgcgcactgctctctgtattaggcagtaaaaaaactggtacataaagcatatctccagttcacaatgaagtcaatgataaattgcgatcaataaactatctacacctagatattccatttgtgcctgaatttagaaaatgtaattcacttcatttgctatattttaaggtaaaattcctggtggtgcagaggttaccatgaggggtgataggcacaacctgatcgtctactttcgcatggtgtatttacatttatcatgagtttccttcaaggtaaattgtcaactttgctcttcttactgtgcagcttatacctgaaggaaaaacataccactatgaatttgagctgcacttagaaaaaaaaaataaatcatgtgtgcagggaaaagattaacaattcaatggccatgagatagaaagatttttaaaccatgtgcaattagtaatcaagtcccattttcagctatgatgtgcccaattattagatcaacaatcaaaagaagaactaggcaacatgatgttttgtacagcttcatcaaatgatacattataacagattatgccatggagcaaacccaagtcatacaataattttcttggatcatactaacaaatgagatgaagagtaaataagactggagtgcatcacaagtaatacgaaaatggaccaaaagaatttaggtgatgcttcgtcgtaactgttaaattttcacttcattaagcttaaggatattcaagttgaatctttttcatataccttttttctggataaagggcagggcccttgcttttaagagcaagtttgggatatagaagtttcagtgctggggacaacagctaaacatgaaggaagcatcaacatggcctaacaggggaacagtatggagaacacaaaaaacaccgattgaatcgccgttttgtttcaggttcgctaaagacccaaacagaagacaatccacaccctaaagaaagtaagtattctctattgttcgcagatcagtcgcaagcaatctctcaaagaacagggcccagaaaaatttagcctgatgttatgcaaatggagaacacaaattacactgtatatagagatgttcaatattatagcagcatgaacattattacatcagctacatcaaactgcaatcttatatcctaacaccacagttaccattgaattaaaagtagtcgtctaacatcactaacatcattctatgaaaaggagaagaagaaggaggatatccagcctt

SEQ ID NO: 50150 - DNA, 727 bp, Oryza sativa
gcagccctatgagtgatatcagtgatcatcagagtgtaagatcccctcatccagccacaatatccgtttcctacattattgagcattgtgccgcactgtaacaattcatctagagagtatttggcacacatgacggaccaattgactacctcaacatgtagcaatttgcgtggttagacttggtcaaaaccaacggggcatgggtacagaaaaaaggatattaccaatggtcccgatcagaccccttaacttagctgtctatagctagctagtctctttccaagactttcttcttcttttttcttttttttttgaggggctttccaagactttctgcattgcctagagtatgtactttctcttgttctttaatttgctcttcttttcaaaatatgatggagaacactagcacatagtttagtccgccagtgcttgactactccacaaatgtcttcaaatggtgccaccatctgctagtccaaattccctgtggaccttggtatttccgtcttagtgaatttgacgcttttgatgttcttgctcaatcgtactacgtacatattccatgccctgcttatcctacccggccggagtggaattatctactggaaatcactagaggtacaaatgttggggttgtttcttaatcatggatagacgatgactcgatccacttgactacaaggattttaaatcctgctgctcacaatttcgtacacataagtgt

SEQ ID NO: 50151 - DNA, 569 bp, Oryza sativa
ctaatagctcgagtggatgtccatccgtttattgcatgtcaactacttaattacgaaaaattttcaaaaaaattgccaacatagattaatatgtagtatatcactctacaaacatgtaagttcaaattcagcttctacaagttgtaacaaaaataacaaatttaattgtaaatatacatatagtaatttgagttttgtttattatttttgttacaatttgtagaagttaaattttaacttgcatgtttgtgtattaatatattacatattgatctatcttgttcttctttttttcaatttttttcataccatttaaatgacatgcaataaatgggtagacgttcactcgagctgttaaacagtttcccgcgataaagttaattaaatgcatgaacaagttatatactgggagccggtggtctggttagatgtggagcgctatgaacgaagcatataatagtcggcagggttaggtcggggtgagaggtcgactcgttaagataggaggtggtagatccagcagtacgtggctctaaagatgggaaggcaatgcactgtggggtgtctag

SEQ ID NO: 50152 - DNA, 554 bp, Oryza sativa
cacaattacatgatgaagtaacaatgcctaaattatgatctaacaaaacaccaaatgaacttaagggggtggcttaatatttatacatgaagtgatctaagacagtgtgtatgacatggcacgtgccctacgacaaaccagacccatctgcccaagtggaggtgatgcaacaccattggttttggtttctaagaacaaaccactcttacgattcagattggttggatccgtcggaaagagaattccgagatctttctatcaaatccccacatggatttttagatcaacgggtatgctcgtttgaatttggggtggtgcagcaaactgaaccgaaatattctatcttgcatcctcgttgagcttttgttcatctctaccgtcattcctaatcacaataacatcaccactagcatttagtagtactacccaattcagtaaatcattcttatgcaaccctacatggtaattaagttgacggacacgagctcgagcgattgatccttaatcactggttcagcttgtgtgcctgccgttggcgtgattatatccatgca

SEQ ID NO: 50153 - DNA, 605 bp, Oryza sativa
acatctgtctgaaacagcggtcataacatcacagagacagagattcgtagcagtgcaaaagttttagcgccaagtgcaacgaagcagaggagagcgaagcgccgaagcgtgtgcgtaggatgaattgcgtggttttgaacggggaaaatcacagatacgctttcgcgtgggcccacctatagcctgacttctcatcagtcgctttttactagaaaggggtcatggtagtaggatattctggcggacaggtaatcctctcctttttcttctttctcgcgacggtttacgtacgtgggcgtggccgcgtgggcgctcgtgttcgcagtcgcgtcgcgccgccaccaaaccccagggactgtggtggaggcgtggagccacctggagaacgttggccaagaccgcctcactcagtcactctcacccgttcagagcgtcgaagggagactgtttctcgctccccatctactatacctcctctgctttcttctgctctggctcccctgctttgcaggagtagtagtcttagtgttctccttgcattaggattaaacccggaatttaattcctcttgctaaacctttttttttacattgagaaaatgtcac

SEQ ID NO: 50154 - DNA, 657 bp, Oryza sativa
tttgctactctaagattggaaattgatgttttccatctagccatatgtcatcgacccccggtgtattgtcacagcctcactgggggcaaggggcattctaaagagtggcaaatgatcatatttgcctgtaatttcgatgactccagctaccagacgatccggcaaatgtacccagatttagttttgctctcttgtgcaattggtgattgctggaagctttgaataatatagcctgcattggtacagagaagcaaagactaaattaagaacctactgaaataaccgcgaggaaaatgcacgcatgacacgcagtaacttactaactacatctgatagagatgtgccaaatttaatatctcagccgaaatcaaatagcacctatgatttgggaatgggcaaaactatgtacaaactataggcagatctagaacaaaggaacatattttaaatctcaaatatgaaggaatgaaggctacctgcgcaggagaacatgaaagaggctcaacaccaggtttaatttgtttgggggcacacattatgcaacactttcattaactcctggggtgaattgatgttgccttttgatatttctgcactgaaatcaggcaagctctgcaacaatgctttgccttcattgcttgcaaccagagaagtgga

SEQ ID NO: 50155 - DNA, 1509 bp, Oryza sativa
aaatacttcccttgctcaaataattcccagaaaattctagaaaatagaggagcaagcatagtatttaataaaattttatctaactcatttttatattgaaaattttcctagaaaattagggtttagcttgtaggcttttaaaataatttctaaaaatgatttaaaatatgcatttttaatttaatcgatttttagggcgtgacaatattgccagagattatataggatatatgataactcgatgaattacataaacaagattagagtgtcataaagatggaagcactaatcccgagaacgcaagccaccataacaagttttacctctagttgaagatcgaaaccaatgcagctcaacttgaaagcaagaacttgtcgaaaataaatgaaagtaaaagagtggtgatgcgccgagattgtattgaacgattgttgtttgatttcatgggttcgggtcatatttatacccgtcataaaaaatatgtcctagtctttgcggcagacttttgcccaaacttatctctaaggatattacataaaatatcctaattaatagatacaattgccttttcaggacttaatccgtgcgtggcaatccatatgaagcacattaactcaattcgacaacgtgtaccgagtcacattgtcggaatcggctcaatcggctaccttgtctgactcgaactctgccgatcctgatcgtagccgattcggacttcggccgattcttgctctgtttccggaacaatctttctcttggattctgcttcaattttatcttcatctccgatacttgaattaccaaatttggtcgttaacaaatgccccccaagtctggaatatttggtaatgtttcggatttgccatattttatctccaagaaaatcgctcattgccgtttttcctaccgttaccacagcgctttaaatactaaccgtcacccctgagaaacttcacaccgttacttctgttttcacagcttaagaaaatcttgccttttctctccggcgatcccctcggtgcataaggcgatcttgagatgattttccctccgaccaaacttccgcccgtggcaatgtcaatttctgccagcccgtctgctgtgccattagccgaatatgcagaggtacgtatccatcggctagatcctctcctttgtgcagtagatcggttttcctctgtctcatcttgttttcttcttctctattcttttttgcatcggtagcatctttccaatctggttgcgattcccagtctatcccatgagcatcagtatttccttggtcctatcggcgattccgaccccattgagttcattatcaccgaaaccaataggataccttttagattggcaacccaaatctaggtcattggaaaaacactttcaaatcttggccttcccttgagaaaagatggcccgcctggtacaagcgcgtgtcggctagcaaacaagttcactgggacgaactcggaatcggccaagcgcttgctctcacaatagcaaattcgg

SEQ ID NO: 50156 - DNA, 545 bp, Oryza sativa
cagcccgactgggaggcccatggcggtggggaggagacggagttggcgacgacaacgaccggcgacgaccccgcgatggagactgctcggcgacgaccccgcgccgctcgccatcggccaccgcgcccggccccgcgccgctcgccgtccgccaccgcgctcggcgagagagaaggagaggtgacgacgggtggctcaagatagagagagaggagagaggcgacggcgacgaccagatccggccaccgcgcgtcgcggcagccgtcggccaccagccggcgacgggcggagggcttcctcgcgcggcggcggcgaccagatctggcgcaagctgtcggcggcgcgccggtggctggggagggcgcaagctgtcggcgcggcgacagctggggagggcgaggagggaggcaatggcggtggctggggagggcgaggatggaggggacggcgacgcgcgcgagagaggggagtgattggcgatgcgcacatgagagagagagaagagaagcatcggtgcggtgggggaaaaatgtcgtcggtgggct

SEQ ID NO: 50157 - DNA, 671 bp, Oryza sativa
aaattttcgtggcatgcttttcaaactactaagtttgtattgaaccagtggtctaaccggttgaaccaataaaccatgaactaacacttcgttggttaaatatcaggtcatggtttttttagaaaaaccctacatatcatggttgaccatcaagtcaatatattcgaggttgccttacaataatacaaggctaagataactattcattgaagaatccgatccataaaagtgttcacaagcaatcaatggttaaaaacatgtaaaagtggcccaactacaaatcacgtgcacaaccccggccctcaactggagatcgatgatggggacatcggtaaatatttccacggtcaaattcaacattccatccagagtgaccaaaacaaactcaccgtctctctcgatctcactctcacaggtaggatacaacctcagaatacctgtaattttccctcatttttgttccgacggaaagatgtctgtctgtaaattttttttccgctatgagagagttcccctgtaattttgcagtacatttttatttttatcaaagaagataaaatatattttgatcgataatctgttcaaagcaacctaattaaaactcgcacattttagcgttatgcatgcagtgatagagccagagagaattatttcaaaacccgatcgagcaa

SEQ ID NO: 50158 - DNA, 844 bp, Oryza sativa
  unsure (1)..(844): unsure at all n locations
atgtctgctgaatactagtatatgtaaatcatagccaatactacgtatctgttcatctctacatctcaaacacatggcgtgttcttcaaacttcacaagaaatgnagaatggatgatacagaacttgattttactcatacatatttgcactgtcgaattcgatctaattgactcgaccgatggccatggagatgtatgcacatcctaaataatttcataattanctctctctctctctctcattgattgattgattttttttaggaccgactatttgccattgcacataaatcatcttaaaaatttcgtgaattctaaaccattatattgctttgagattcttacggtacctcctaacccctcctgactcctagcttgatgcccctactaccactaccgtaagtgttgcccaaccttgccagcgaggctaaggcaataacatcagtgagaggcccctagctgacctcctccccctccgctctctcgccctcttcctctcctcaagttggtaatgacgaggtgctcttgccatgctgtctttctcatatccagtggctcttcgcctcttcgccactagtagaggtagagccacttgtggaacagcttgggcttaagccccacacatggcaaagaatttcaatggatatagaccaaattttagatagaatttcagtaaaaagaaattaaaacagcatggttcaacccttctcttggtgaaatatttcctccgcccctggttgctggagacactaccactcccccggctcatatccattcactccgctttgtgcctgtcgccaacactaggccacaacccattgttgacgggctgcaggaatacgag

SEQ ID NO: 50159 - DNA, 4075 bp, Oryza sativa
cagaagtatcataggtggggttccgtaccgagcaaaccggcgatctaaccgatcatgggattacacggttcgctactttgatctaaacaaaacccaaattgatctatggggtcgtcctctaaccctaagacctgcccctaacggactcaacttgatacacaacccattgggcccaaataagttgacgcaacaccgttggcagaaaaaggtctagtaaaacggcgattgcagcctctccagaacagatttgacatgaggccggatccatttgaaatagacttgataagttttcgatgaagtacttgcacgccaaatcggagttcgtatgaagtcgtggcgatcgtcagaagttggtgctgtcctgcagtccgaatccagcctgcgcgaatcctctcccctctggatcctctccattgttcctgagtaaaacaagagtgcacgtgtctctggggtataaagatgatgaacatggactcaagaatgaactcacctgatagttgacttgacgtgcacgagcacgggtaataggactatgaagttggacttgtggagatgtggatgtaccgagggtgttgatgtcctcatcaaaaacaaagtgactttatctgcttgatctggttgccttcacttcagaatgaggaaagtcaaaccaggcagtttttgtgaaactgacgaacaaagtgatgtcagaaggattatattacattagctgaccgacttgattgacccacataattgttcctagaatgggtgcctcagcaatcccctgcctcaattttcaaattctctctttccacgtgcccatattcctttaaatgtaactgtgtccccttaactactagcagctggaacctactctcataagaccatcagtgttatgtaaccacaatgcatgtctttcattgctatatcagaagcaagtgctaggtagtgaacatcccaacacatgtattggttcttttctttctttgttttttgtacaacaattgaataaagtaagttcctaattttttatattaatccttttgctatttctctccacaatatgagaaaagatatgccaaagtaataaaatattaatatgtaacaaactgctggttcaaacctatgaacggtggtgaactgtgatttgataacctgactgttttaacttttgagtactggagatattttttatagattttgcaagcttcattaattttggctgttgatttgtatctgattctagtcctataaaatgtcatcagttatattatttgatgagccacatgataattatattctttaataatacaagcacatgtagagtgttcagatgaattactccatcacaatatatagctacttctagtgctcaaatcttgtcgtcgcaaccaattacaacctcctcattcaatttctccacctaccttctccatctcaaccaatcacaacaatctcgtgtttcacctgtcttcttaatctcagtgaattttttttctagaagtgcttatattttgggaacggagggagtattaaataagctgacaagtcactacatgtctttgtgtcatcagtgctacctgtggaaaagtgcaaacatggcggaaaacttatctatttgtcatgacagttcaaattctggagttaattcttcgtttagcagcacttgcaaaattgttactcaacaaagctgtgaaacatgtggttccataagaagagcagaatccaaagatccaagtgaaggatgtaattgtccaaaatttccttctgatggtagatcaggagagtgttgcaactgctatacccacaacaccaggaaaagaaaaaggttatacagttggcagcgccgcagcaaaaagaaacaggtctgttctgtggatgagtcttcagcagaatggagtaaattaaatggcagtaatttcaatatgtctaatggtccatcggagaacctggctggaaaaatgaatgatcaagcacaatctgtcgagctcacagtagataatacttctttggcaaggagcaatgatgacagttcttcagaaatcaaagtaattaatgctactatcttgtcatcagaaaaatcaccttgttcagtgttcgacataaggggttcccagggtttatcttgtcattacagcctgtcagaagtccagtaccaatctacatgtccccaagttgggccctccagttacttacatctgaatgtcagcttcccagccttctattcttttttttacctcttgcttttaagcttgcatttcattcataatggacaaatatccatttatttaatatttttgtacttctgtagttagtttatttttttatcaatttaatttctttgagaacacaattccgtttagttattttgagaaaacatcttttaccgtttagaaaaactgttatttactgaaaatgtgccagaatcaatagtttggatgtataaatagtcaatgtatgggttggtgtacatatattttttaaaatatactccaacagtagtcctgtaaaccatacaactggaaatgtcatattctgtcttgaggataccattttaggactctaatcaagtcaacgtcttgaacaatatgcttgcattacttgttccttgatgaacttactgtaataaagccatgctgatgttctctagtaattatagtttctttggtttgtattgtttttagaaaaaaaattccttggcattgatctgatgcactattctcttttaggatactgttgtttattgggtatgaacttaaaactggaccctttgctggccctggcatgtgggtagaaattttcactcctttagtgtatatccacaaatcattcattcactttttcttgcacatataatgtttctcataatatgtttttcaatctattcttcctccagagtattcttgaaattcaaaagcacatttctgttgaatattttactgcacactatcatggaactttttaaatgttctagtcgtttcatctttatattttttcttgcagagttgttccatctgcttcaattgtataatatcaaatgcatccaaacatttatcattagattccttgatatcaagaaatggtattttctataacagaaggacaacctatagtgtcttccattgcaaacgtatccttttgctgcttcatgtaccctcaaaatctgtaacaagatttgcgaatgcaaagaagtgttacttgtcataatgatggggaaaaattgagtgaaacctgtgcatgagtgcttattttgtctttcctgttggggcctaaggtgaataggtgatgaggtgtttggagttctggaggaaaccagaagcagtttgtctaggaaagggaggattgtacgatgaggtgatgaggtgtatggagttctggaggaaaccagaaacagtttttgtctaggaaagggaggaaaccagaaacagtttttgtctaggaaagggaggaaaccaaatctataatgttttcttgcttgtttctgttacactagctaatgcgctttttaatagggatttaaatagtactagatctcctacattgcaattcgaatatggaatcttctgttgtgttactcagtagcttgttgctagatgtagattgcaatactgatttcctgtaattttggtagcaaaggacacatttggccatcatctttagataattttgtagtcccattcaattagctttaattaatgcaaagagttcttttcttttctttaacattccgtgtcattgtactgttctaaaattttactatttttatgtaggctaggacatttgattttattacaagtagttctatcaattcagtttttgaacaaagttcaatgggaaaaaaaatagaggattatgcaattggtccattaccactgttggattaacatctcctatgtatggagcgatctttacatggcatgttatagtcacatatcagatcccatgatgtgttgaaatctagcattgcctatgattacagtatgttgtctgagtgttccttaatccttactgctgttagacatattaagcaaaaggaaaaggccagatgctctatctcttgtaaagcacatatttggaatcaatagttgctgtg

SEQ ID NO: 50160 - DNA, 798 bp, Oryza sativa
tatatgcaatatacgaaaaacatatatgattttgtgcgatttagactataatacccaaaattttatgaaatttactctatctacaattacactgaattaattatttcactgatacttccccttttaaatggtctgatgtttcaaacaaaaacttgagagaaaacctatatataagaggtgccataagtagcctacttttttggtttggctttgtagaattgatgtaatattcaatggcttcaagtttaactttgtcttcttcttcctcttcttcttttttttgcaatgtttaggagagcatatttgactcatcaatatatggcgtttgttgcttaagcaggatgagggtgagatgatgaagaaggggtgcaaattgatggaagctagaatttttgcagcttttatcaaagtctggatatatagaacttgatgatttacgaaagggcatgtagcctagtggttgcagtgacctgaatagtaccataaagtcctgagttcaaatcttcataaaagtgaatttcatattgggttatttgcggggctaagttcctaatttaaatgtaccccaaggttctaagttcaaatcttccttcaaatcttcataagactgaatttcatattgggttgtttgcggggctaagttcctaatttaaatgtaccctaaggttctgagttcaaatcttcatagaaagtgaatttcagattgggttgtttgcgggaaaaagtttctaatttaaatggccgcatatatccggttggatgtagaggccagataaaaaatacccttctctaaaaaaa

SEQ ID NO: 50161 - DNA, 877 bp, Oryza sativa
tatatatatatatatatatatatatatatatatatatatatatatatatatatatatatatatatatatatatatatatatataattctactacgacggaaatacaattcatagttccttagcttctgagataacgactactactacgtcgaaatcgtagctagctaggacatcataatggattgtaattaatacatgtctatttttctatatgcatgtacacattttctttaaagataaaaaattttttggtcatatatatatatatatatatatatatatatatatatatatatatatatatatatatatatatatatatatatatatatatacacatatgcatttgcataacatatatatatatatatgtataaatacatatatattatgcatgtatatgtattgaaacatatatatgcatggtttttatatatatatatatatatatatatatatatatatatatatatatataaaccatgcagcaacagggccatgcaaaaaaaaaaggtcagctcgatctttagtcctggattggtagtcccggtttgaaaaccgggattaaaggggggttacgaaccgggactacaaacgctttctccaccagtgtcccttaacaacaaaaccagaaatgtgtacccctaaactcactcaaaccgttcaaaggaggtcccatggcagtatatatgggtggttttcattgacgtggcatccaaatcagcaaaaaaaggggtccacattgtcggtgacatgggaccgggggtatcgtgactagaggcttgggcagccgcggtcacccacatggcctgaccccctcgggggggtcgggcccgagggtgacgtggccacccctccctctgtctccccgaggggt

SEQ ID NO: 50162 - DNA, 1077 bp, Oryza sativa
gttgcttaccatgcactttgcattgcagagctctatttcacccacttcacgtctttgatgcttgttaggctgtaaaactggtttagcttacatatcaacggcatttaatagtactagatagaaggatcatgtcttaacagtactggttaatagtactggtttagctttgtaatcctaaataaatgttctgatattcaaaatttcaaaagttaacttcagatttgcatcaagatactattgtttacgttgtttaggatcaacatcagaaggagagtagaaaagtcgttttgaaggcacaggcagatttggtattcaagcagaagaattacgccgctgcagcaaaaatatatgatctggtaatttcttgcaccttatttctgattgttaacgctaatcaattattgttgttataaagtttttgtatgttattcttaagcttgggaatgatttgtttatctgatgcttgagcataggcaatagctcatggaccgactgcagttttgtacgcaaacaggagcatctgtagattgctcatgggtgatggtgaaggtgctctttctgatgcttacagatgccgaatgatgcggcctaactgggcaaaagcttgctaccgtcagggtgcagctcacatgctactcaaggtaagactcactgcagttaacgttttgtgatcctggtattatggtcggtgtcctgaactcctgatttactctaaaaccaggagtacaaacatgcgtgtgatgctctcatggatgcacaaaaattagattctgggaatgtcgagattgagagggaactaaggtaatcttctgtttcgctcgagtatgccttccaaataaaaatgtggttgcgcagggaacatgaccattagtactggcattccgttgtgattatgcccacatttactgcaactgaagcaactcaacactcaactgttcttttcggttttatatgccattcttccatctttgggtcaattttacgctttgggttgttataactgacatttttttggtccaaatcttttgtaggaaagctagggaattaatggcgaaacctccagatgagcagtgaggc

SEQ ID NO: 50163 - DNA, 1241 bp, Oryza sativa
tttttccacgtttaatactatatgtatgtgtctaaacatttgatgtgatagatgaaaaagtttttgttttgggaactaaacagggcccaagtcgtgtgcagtgcaccggtccgcttccgtgcgtgtgtgagatgggcgttccagatcagctccaagtttgcttgaaagcgtcgcttctcgttgcgttgccacttgccaagcagcagcacgtgaattcgttgctgttatcttatctatcctggaaagcgacatcgccccctgtggcttggagttgcacgtattccattccatctctctctcacacacacggatcgacgatccacgatccactgtaccaaccgcggcatatgcttaccttaccggctcctacccccaccagcatataccacggttctaccgtagttgtacggttcagacagcgtgtgatcggcccacccacatgcatgaaccagaagcattcaatcaatcaaacaaacaaacaaacaagatcttccgcgcaggtgcaccagttttggctccaaacggggacgacgacgcgacccacttgagcctcgccctccagcccatcgatcgatccccctttagctgagcgaattattccacaagttccacgacgacgacgacacggccgggcgaggcaggcgtacatatgaacagcgcgacgcggccggaaacggtcgcgtacgtggaaacggccggtgcgtgccgatcgatccgtgagccaccttccaggcgcgcgggagcagaagtgtactatgccattggcagcgacggcgagcgaagaccgcgagcgagctagtggacacgggaggttgctctcgcggcgcgcgggaggggaggagaggagagggagaccggtggcgcgggtgcgctggaccggttcacgccccgcgtgcgcgccggggaccgaaatatctgtccgcgtcgtcgatggccggtgtcgccgtcgagcgagctacggaccaaaacgccgggatctcgaaggggcgcggcgctgcttacttggttgcttgattagttaagtttatccgccctccgttttacgcttttctgtttcccccggttatttaagccagactcaagtttctcgaaatagaatttaaggaagggtgtgtttcacgtcaaaattgaaagtttggttgaaattgaaacgattcgacagaaaagttgaaagtttgagtgtgtagaaaagttttgatgtaatggaatactttggatctaaactcggccatgggatgcat

SEQ ID NO: 50164 - DNA, 780 bp, Oryza sativa
agactcccggattcatcaggccgatcgatcgacaatgagtcaccgctaagtaaatcaaacgggaagaagcagcggcgaagttcttcagaaaatttgcgcgatcgctatcgatcgatgatcgatgcttggggggccaagttctgtatagctaattaagctgccaatttgctcaaatggtcactggctagtcggaccgacctgtgaacctacttatatatttaataaaaaataatccgtgagtttcacgtcatggcttagcttatcgtgtcgtaaagatgcaagtagatcaattcataagtttattttgaggtcaaattaataggtaacccgtaaatcaatccacgggttactcactaattttatctataatcgggtttacgggttaatccgcttgcatctctactggcgcgcacgttagttctataattctaacagttgcaatcaagttataccaattgcaaccaactattcagcttacagtgcatcgccgtcacccgtcatacgtcaaagacgacgctattgtcgtcaacgccaaatcatttttagattcacctgctgattgtttttttaaaaaataaaaagattcacctgttgcggtcgagcacacggtaaattcgaagttaattaactcaatttgtttgttactgccgtcgcatgttgagctattcccacaggcgttttgggttgtcttactctaagttatatttttacgagtttaattaaatttataaaagaatatacgttttcaacaaaaaaaatatattgcaaagtgtattcacg

SEQ ID NO: 50165 - DNA, 2301 bp, Oryza sativa
cccaaaccctagcacgcaacaagccaaaacgagcggccttcttctctcctcgctttccacacgaatcccatcccagaagagggaagaggaagccaaagcctctcctagatgctaccacatggttccagttccaaatcccaccaccccgccgacggcgacatccactacgccaccgacgacgacgatcccgagttccccctcggcaccacgaccacgcagccgcaggagcaaccagtggccgggccattttgcggcggcagagcaccatgggtgcgcgcggatccgtgtggcgggcatggggttcgcatcgcacgcgtaccttggcgggaagcggccgcgcatgacggtccagccggagacgcgcccctccctctccgtccgtctccccgctccgccgcggcgaggaagaagagatgggtgtcgcggcgtggccgtggccgtgtgggagaggaagcggcgacgaaacgaggctgaaaaataatttgcaaataaaattttgatatagtacgtgtttttaacaatcttaaagtaaatggtgaaaaataaatttcgctgaaaaaaaacctaaaatcaaatttggttgaaaataaataatttagctgataagtataagtaaaaagatgatgaagctggataactgttttgcttttagagttcttttagccgtttgtttggtttaaattttaaaaacaaaccctctaaaacttggttttcaaaactaaacctttctaatcgtcgtgctactgtggttctgcggcaactaaaattccaaacacatgtttaattttcacctctccagctctccttgtatgaatttgctgtttcgtcaggtaaaaactcgaaatgcagtgcacaaggtagtctcaaatctgtgaatggatctatctctataagatcatccacggcaattccagaccatctcataaacggctgaagcaatgcatatccaggtgcatgggccgcaagaacatatcgcagaagcaaaccacgcaaaaagatgtgattctcaatgaacattattgagaaatgtcaaaactttctcaagtctggaacccaactgctgtggcataataaaagaagtgttcagctgtggtttatttgatcattgccatggcgccattgcagcaagcatgtcagcattctaacgtcttgaagacgcactcagaacttgtataccatctctgcagtgtatcctaactctttcagaatgccggtgagctgcagagtaaccaaattgatgatcagtaaaacattaacatggccaagcaaaagagggcaataaagtgataaaacgaatgtcatgttgtagtggttaatgcaaatctaggaactaggatacaactgggatatttagatcactggaatgctccctggctagctttgacaggtctgttagctggaacttggcaagcgaaaattgtcgcttttagctaggaattatcttagtatgttcatccagatatcattctactgttttcatccaattaagaaggataagaaatatggcactaactacaatcacaaaaggtagatagtgacttcacattacctcgccctgcgatctatcctttgccttgtcaccggatatatgattcatcatacctggaggaccacaaacctgaccaagcaaaaaccattgaatgactgatgctttcttacattccaacattaataatcatgtttatgctacacatgaatgaagataatgttgatggagattataagcgagctttaaaattgtacaaactcttgtcaaaagcttaaagaatatcagcagaactataagcagaaatgacaaagactactcacaaggatcagagaatcctcccctggccgtggcaaacctttcaaggcaatgtccttggatatgtagccaacaccacccctccaatcatttgatggtttgtccaccgtgtagaatacctagagaaaaattaccagggcgtgttacactaacaaaaaaatcccatgtaatcagatcaaaatgaattaaaccctgtagtaataccaaccttgaaattaggatagctactggcaagtctatctaattcccttttcagcaagatatcatctggtgacacattggcataaattaaggaaacctagaaataccaagaaccataaatcagattagaacaaaacattagtcaaacattatatagctaataatgttatttctggtagcagtatgaaagtggatacattgatctgttctgtcatgtcagcatgcataacaaagttacgtggtatagcaatatcgttcacataaaatgatagttgctcaaagggataggctgcagg

SEQ ID NO: 50166 - DNA, 722 bp, Oryza sativa
ggttgatattaaatcgagtagtgcagttgtgcaatcctaggatccaacaaaattccgtaacaccagaccccgcatagacccatgactccgcacgtatattttgtgaccgttggatctttcgatctaacgtcccatccctgacctccccactcggctctgcctatcacgcttctccctccctgattcctctcggaaaccgcatctcctccccgagtctccaggcaggcaggctcccagcaaccgcatgcgtcggcacttcatcgccaccgctctgccatcgccgcccaccctagcacccagccaacgtcgtcgccgcctaacgcgcccaatgtcgtcgcagccatcgtgcacgctataagagcaaggttaatagtatagccaactactagctctaattcatctatagctaatctaatagccaatttatacaatagttgtttactatactaatagtatatggtcccactgtcatacatacattgcatcttggagtccgtgctgcagctagctacagatctgtatcccgctgctcttctctctcatcttttatctcattaaaatatatttgtagctggctaatattctgctattgtacctgctctaattgtcgcctcccccgcttctgcttgcctcgccgccaacctcgcccgtcgcacctcttttctcctcaccttcacatacaatcgtgtgaagatttgtcttttagttaacattttgagggt

SEQ ID NO: 50167 - DNA, 1139 bp, Oryza sativa
ataataaatttaaacagtctgtctagtacaatgaatctggatagagagtgagtcagattcattgtgctagaagaaattacatctttacttcgattaagggcatccacaatgtactccaaaaatggtccataagcaatataatatttgattcagccacctagcaacattgtgaaactagcccataggaaagaaataacaaaagctactcataaacatatggcctgcctatagagaataaaatatattatttgtctctatctcttctcttctactaatactatttgctatccatatacattgtgaaatttataatagttaaagtttatatatgtgggttctagttttatggactacttttgtcatatatattgttgttgtcctcagtgttgtttttaagaacggagggagtgcattcgacgatgcttactcgtgacaaagtacaaataattagtgctaactcctcacaagcaacggcagctgcctattctgctttgtacccctgaacagcgaacacatggccaacttatatactgtactatgttctaatcacaatcttgatcttgccgaccacctgatccgtacgactaactaaacgctacctgagctagtgaaagtgactgcgtaatacttcctctgtttttttaaacattacttcctctgtttttaaaatggtggttttcgattaatattgtatttgaccttcgtcatattaaaataatgatattttcgatgagtatgtactaattattatttattttcgtgtggtttgttttatcattaaaaacgctttttatgcatgagtagtatttctgcaaatttatagtattgatgttttaacacgatgaatggtcaaacatatcaagtcggagtataaaacaaaggaagtaattatcaaccctcctctgcatattaggcgaccagacaattggacatttatgctgcatgatccgatcgagattagtataataaaccagctgataatataatcagaaacgtgcgtgtacgtgtcagctggttaattcgcccagactttttaatcagcgagaacattctggaggttaaacctgagccatgtttcagatgattcgcattttatccttttgtttcatccgtcagctgcctgcctggtctgagaattg

SEQ ID NO: 50168 - DNA, 830 bp, Oryza sativa
ttttttcttctaaattacttatctgatctataaaccgatcacaccgttgtattcgttgcaattaaatctttacaacaagatatcacatgattatattatgtcaaaagaaaaacgtatgtttcaaaccgttaaaacaaaatgtttcatacgtgatagtgatatgtttcaatatgtgttttaagtgtgtttcacaaaattcctgaaactacctactactactctctctccacctcatgcatgcatacatacatgtattttagcaagcttcaaaataatttttctcttaaattacctattcaatctaagaaccgatcacaccattatattcgttgtaattaaatctttacaacaagatatcgcttgattatattttcataaaagaaaaacatgtgtttcaatcagttaatacttgttgtttcatgtgtaacagcaacatgtttcaacatgtatcttcactatgtttcataaaatatttaaatgttccagttgctgacttttttgtttcaccatatatataacatgatgttttacttgttggtcaactgcaacatttgaccatccgtttttttaatttaaaaatgtttcacctaatgtactcataatgtttcactatgtatgaatcaactattgcagtgagttgaaacatcatttcgctattcgctaaaacattattttcatataaggcgaaacggcgtccaataaaacattttcgatctacctagtggaacaagtccgatatacttggtgcaactgcgtgcaacatttaaaaataattcaataataagctaaaattttttttcatcggattatattcatgtgtggtcttgttt

SEQ ID NO: 50169 - DNA, 1158 bp, Oryza sativa
acgctaactcatggttatttatgtgtattaggaattacacatgatttaaacacgatggaggagtcttacacgtacgactacacaaagaatacagtaatactccaatacataaaaatatatgatgtcaccatttcaccatagagctatacaacttacggaaacggaataaaactaaaatattttggccattagaagtagaacctcatctaaataaccataaataaattatatatttttttattacacacaacacgtatgtgcacacataccactcactcactcacctgccagtttgctccaaaacacacgttttgaagagataaaaaccgccgcatagcccaagccctactatacatatgataaaatttcttgctaatgttgcttctatgaaactagtgcatgcaacaaacatgagctccaatataatgttttaatggcccaatcgttaatcatgcaaggcaggatcataacaagattttatcaattttatcatacatatagttattttcagcatagccctgactctgaatacccgtaaatttttattaaaaacggactcacacatacataatatttatagatacagggaatctactgacccactattgtccccctttaataagtttcattttaaccgatcatctgttagagtacgacatcttttacattaatgtaaacgtctcaaaactaaattacacctttcgctataaaactaaatcacaacttactgtttctcatcaatacagcgtggcaaatgtgtcagcatctcaacaaaaagctcctgcaatttactcctccacaacttcttttcattttggcatcgtaggctcgttagtagcagctgttcgttgcgcttagcttgttggttggacgagaaacccacatcggccgtgcctgctgctgctgctggtggtggtgatggccgtgccttcggccgcgcggcgtacgtggcggtgccctgcagcagtggatgcctgggtggcagggggaagctgacgatgacgcaacgatcggtacacgtcaccatcaccccggccttaaaattaatttttaggtttggttatcacatcgaatatatacaagcacatatttaaagtattaaacgtaatataatataaaataaaatatatgttccgctaggaaactgctagacgaatt

SEQ ID NO: 50170 - DNA, 931 bp, Oryza sativa
aactgcttgtctctaaattacatggctcagcttccatgctctgaatatcttggggtggttctcactaaattaagtgtgtcaatttttcactatagtggcagaacagagaaatttaaccaccagataatcacaggaataaatattcgaggaattaaattaagttaaccaactgaaagtctgaaacttcttatgcatgggtagtctcctagtcaatacaagccccaaagctggagctaagcaaagacttaacaaataaaattcaaatgttataattaatcattggcgaaattgtcaaacaaaaacagaaaacctcatgatattggaacttggtagagtaggagtagtaccagcatcactaaacaaaatatattctacaagggttctatcttcttaatgaagatggtcctcattatgcgtttacaataacaaagggacagtaaaacttctttccgaatgcttccattcccaataacttatactataacaaatagtctaatatatatcagtgaagtaacagatctagctggtttttttttaagaatgaaaaatctgcaatatttatatcactaatacatgtgattgccattcactgaactcgcgaacgtcgtcctcgcggtgcaggacgtgctcgccgtagagataccggccgaaggccaccgcctcctcctcgtggtgttgtctctgtgcaggacatgcttgccgcagaggtaccggccggaggtcgctacctctttctcccggtggatcagacaagatggagaatgaatgtgaaacaatgacaagagaaaagaggaacgattatagaagatgaagagtgaatcaagattatagaagaccaagagtcgtgacccttccggaaatatcaggtggctttgcactttttgattttactccaacgtaagattgttttttatattttagtccttctcaa

SEQ ID NO: 50171 - DNA, 1134 bp, Oryza sativa
ttaatctagtactagatgtaacatattttagtactataaatttgaatatatctatttaaattcgttgtgttagaatatatcacattcagtgtttaatttattttttatgagacgggaagagtatgttgctaagagcaggtacaatagtaggctataagccagctgcaaacataatttaagaagataaataaggagagagaagagcagcggactacagatttatagccagctgtagcacagactccaagatgcagtgtatgtatgacaggtggaaccaagtattaatagtgtagtatataactattgtatagataagctatcatattagttatagataaattagagctagtagttggctatactattaaacttgctctaacgctagctactcagctccacgagggaaacgtgcactagctagctgccatgatgtactaggtacgttgtactagtgtaccacagattcagtcataggtaaggagtagtaggagcactattgagcagaggcaattaaagaggtactagaggaacgtactagaacgaacgtgtggctgactagttgaactgatcctgatcgaggcacccactcggccactcggcccctcctcacgtggacatgcactactttgctatttttaagcactccctgcgggatatttaacactgttattaactttaaaaatatttaaccatacatcttatttttgaaaataatatgaatatataaaaaaatataaattataacaaaataaaattacgtaattttctgaataagacgaatggttgaatttcactctgtttgttacttcgggtgcgtccgaatcggcttccctaagataatttttagcgagacgtaaaatgagataagctattagcacgtagttaattgattattaattactataaacttgaaatttgagtttatttttttaaatctatataaaatgtattaaaaataccgtttagtaatttaggaaacgttctcatggtttaatgaaggagtagtttttttaacttacgaaggagtagtttagctgagttgtagaatcaaatgaaggtgagtccatttcatatttagaatattgtagatgtaacctaagttaatttcttaaagtttgactaaatctattaaaa

SEQ ID NO: 50172 - DNA, 846 bp, Oryza sativa
caaaaggtgagccatatgaaccaacatcatctattcccatgaatttcaaagaaagtatgaatttttaattaacattggaaaatgtaatgaaatattttttttatttttttgcaacgcgtgagcatttagctaatagtagtagtatagatacagagtattcaaaactaatctcaaaagaaaatcaagttcaatgtggcatttcgttcattgttctgcgagctttacagccaggccatggaactgcctgccatttccgtggaatctggccatctgggcctatctatgtgggctgatgacagttcgtgagccaggccagaacggactccataggctaaatgggctgggctttgcaaaggccgcgcgaggcagcccacatcaaacagggccgtctttgatgcacacagtacgaatctgggccgcagaggctaatcgaacggctggtagcgacccaccagagggggtcatctttccagtgatgacggcagcagcaaccttgatgctggttgctcatctttccagtgatgatatatatacagattttccagtaaaatcaaagcacgcaattagtgatcatgatcgaaaaatcgattgcatgcaagccatcagcagcctgaaaataaaggatgtagattcagttatgcaatcgatcggcctaatcatgcagtagtttcgcctgaaaaaggatattagattcagttatgcatgcagcttcgaaaataaaggcagtgtaacgtactcccacttcagataaacttgttcaagatacaggtcagcttgaacatacagggatagcagatagctagctgggtttcagaatttcgttcagctggttaataggcaaaaacc

SEQ ID NO: 50173 - DNA, 510 bp, Oryza sativa
gtccattgagatcagagagctcacaactaacaagtgcaaaaggtcctggaacttggctaggaagttcagaggttctgcccagtggtgttgggccatcagtttttagtccgcagcagaatacctttgtgcataaatcagaagatgcagaaccttatcctacacagcgaggtttattacagtatcctcctcagtatcctgcatatgacaaatacatgacacagctttcatcatgttcaacaaatgtgccacctcctgtcatgtggacgccacctgccaattcttctgaagtggtcgaacaaatgtttccagtgatgaataaaaatactggggaaagttcttcatccttttcttcatatatgaatccttgtagaatcaaccttgattattttgattgcatgtggaatgaacaaaaagatcttgggcatcagactactgataaacaccatggaaaatggagcagctctgctagcaatgcgggagaccatttgctcaattctcttggagcagatc

SEQ ID NO: 50174 - DNA, 600 bp, Oryza sativa
cagtttatatattcaggagtatcatcgagaagctgctatattgcgcttgattgtctttgttgtgtagctgtcagcagttgtattagtctatcatcgggaagatttctgattccgtattgtattagttggggtgattcgaacgaggaggtgataataattgtttttttttttcaggttaaagggtggttatgcctcatattttaaaatggagggagtatgaaactactagtgttccaattactaacagcctgaacctaactgttacagtgggatgcacacagcacataggttatatagattggtagattagacagggcggaacactattcttttttaacggagtgtgattagtttacatctctttgagtgctgtaactgggatttcttatgtggtttccacatgagacggttgtggagagtagaggccatgtagtttcaatttttaactgctgcttctctagtctaaaaaagtgtttcctatgacgaaggaattatacttcatgctttttatgaatgattgttcttagttctatagcattcccagttttaagtgtatcatacaaagatttcagctatgagttcacaaatttattagagctg

SEQ ID NO: 50175 - DNA, 681 bp, Oryza sativa
tatttactgcaggaagttgcccgtcacaactatctgctccctgacattgcaagttcgcaggataggcagtgctgttttgtggtttactattgggtatggttgagataaagattttattgccttttgataagtcaacaggaactgcattgataaaaagatttgcatctattagtagggcacactaagaggttagtatccatatccaaatatgtaaattcataatgtctgagcaccttgtgtgttattgtgattttccattgctgcaagcttcacacgggtaagttgaagctcatatttgagcttacatgctgatgcttctgcttcaacccacaaatttttgtagatcgacaattgcgagacatcaatatcatcaagcgtcttatcctctgggagcttagcaacagcctgaagggaagataaggataaggtacacaatagaggataaaaagatgtaatcaattcaaattaaacggcagcatgatgctcctaatcatgattgaagctacctgtgaaatagaggtcttcaattctgaatcgttctctactaatgagtgttcaggcattgccatccataagttattccttgaacaactcatattttgaaccttgtatgagacaaaaaaaaaagaaatgagtaaaagctaatgaaacaagcttcgcctttcctacatttagtctatg

SEQ ID NO: 50176 - DNA, 1157 bp, Oryza sativa
acatcggatatcacatcggatgtttggatactaattataaatattaaatatagattattaataaaactcatccataatcttggattaattcaagagacgaatctttttagcctaattaatccatgattagcctatgtgatgctacactaaacattctctaattatggattaattaggcttaaaaaatttgtctcgcgaattagctttcatttatgtaattagttttgtaagtagtctatatttaatactctaaattagtgtctaaatatagggactaaagttaagtccctggatccaaacaccaccttaatctcaagttggagtgttccactagcctttgcttgatgtcggtttcagtgtctctttgcttaattgagtgagttgagccatagcttgacaagtaataaatgattagttaaatggagtagtataccactatgatgtgtgacgtgtcttaggcttcgtttagattcaaaatttttttacaaaaacgtcacatcaaatatttagacatatgtatcgagcattaaatatggagaaaaaaatcaattgcatagtttacatgtaaattgcgagacgaatattttgagcctaattacaccatgattttaacaatatgatgctacagtaaatatttgctaatgatagattaattagacttaatagattcgtcttgcagtttacaggcggaatctgtgatttgttttgttattaatctacgtttaatacttcaaatgtgtatccgtatatcttaaaaaaattgaaaattgaaaaggaactaaacacggcctatgacgtgtgcgtccggtgataaatttttaattgtaactagttaaatatatctcttgattttaccgtggagataaaattaaaaaaatatataattagtgcgggagacgacgtggggtgggttctcgatcgaaggtttagtaaatgtaaatctgggggttctgattgtgtttatgcacgtcgttcggagaagaccgagacgtagatgcgagattagttagataaattcaggttttgttttgtttgttcctagtatgtttttgattttattattattattattattattattattattattattattattattattattattacaaaaggaagggcaactttcggtttgtgcgcgacttaaaaatgca

SEQ ID NO: 50177 - DNA, 1557 bp, Oryza sativa
aataatatgaaggaaagtggattacctctcacggcggtggattgacatagatccacccatgatagcatcaaagacaaggaaggtggcgacgaccggtagagatagatggcggcggataatcaactaaaggattaggttagatctgtgttcctctccgtttcaattggtagcatggcacgaggcgtacgacccatggcggcggtgggcggaaggatggagatggagatgtgagagaggaggggcggcggtagtcggatggagcgtagatggagatgtgatagacgagtggcagcggcgatcttggggggggggagatggagatggagagaggattggcgacggcaatagatggaggggatcgagggacgaagagataatgacacgagaatagaaaagtggtggtacaatggctattgaaaggggaaagatggagatgcaagagaggagcggtggtgccgtggcggcggtaggtggaggggaggggataataacaagaggaaaagtagcctattagggttaggttgacacatcatgaatttcatacgctaggggataatctgacggttgaaaaaacaacccgctttttgaataaataatttattaattgtggcatcatttcttccttgaaaatgtatttaacatttcaccgttgtattgtaatgattatggtttctaaaaaatatgctaatatgaaaagagtttatcccttatcagacattgtcataccgattcatagttgatcgacttgcccttcctataccgcggatgtagcagttactttcatttttctgaagaagtgttctaatgacttataactctcgactagaaacttgaaacttgaaattccaactgatttaaactcccaattgaaagatcttaaaacttccatattatatgaaaaaaaatcataactttatctactccctccgtcccacaaaggaagtcgctttgctcagtagaaaatgccccaaaatactcgacgctgaactttcccatcagctagtagtagcgcataaaagtgacagtagctaatgaagttttttaaatgatgggaccggttggattactataatccataaagttggtaccaatgtgtaccgctgctgcaagcaccaactattaattttatcatgatttaaatgttcttttttaagtagatgtggcagtataactgattattgcagtgttgtagcgtgctactctcaagcctccgcatgattagctgcaatcctataaaacatgagcaatatgtcattttcacctaactctaatttggctgacaatacctagaacgacatacttcgtgggacagagtaagtagttggtttgaaagtttgaatcaaaccttggactttcaaccaacagatttgatataatctgaagatacattatttggaataatgaaaaagagaatatgaaattccactctcaagtctcaagttgtgatttttcaaccatcacttgcggtaataacggcggaggcagtgaagagtgaagaccgaagaacaggactagaggagtcgcttttgttgcgagatcactgcgccgtgggcccac

SEQ ID NO: 50178 - DNA, 567 bp, Oryza sativa
cttaggatctcaattcataactcctctatagttccggttttctaaccgggactacgaatttaggactaaaaatcgctatctttagtcccagttcaaataagcgggattaaaaatggatctttggtcccggttggtgttatcctctttttagtcccagttggtaaccgggagtaaagagagaatagcggtagttccagatggtctccttttctttttttttattttctccctaatcttatcaagtgggaagcatatccccaaatcaaagtaacatcccaaatccacatcacaaataaagtaaaatcacaaatcttaaagttacatatatacacaaatcaaatacatcacaaatcctaaaaaattacacacaaatcaaatacatcacaggtcatctcagatccatccaataaatcacaaaattatacatgtaaatcacaaactaaaaaaaagagagaaaacaacgccgttgccgccgccgccgcccggcgcggccccgccgccccggcccaccgccgcctgccacgggcgccggcccgccaccgggcatggccccgccggccgccggct

SEQ ID NO: 50179 - DNA, 598 bp, Oryza sativa
ttctgcattcgagtcaacacctttctttttttattacatctcttctctaataagtttatagtaagtttataacttttttttaaacatatagtaggcttttaactcactaatattcttgctttaagtataacacacacgtaggcatacgcatgaaaaactgagaccgacagcggttctaaactcattaaaatcatattaaattgaagacatgcatgcatcgcagtagaaaaataaagcattacggccatgaaacatttctaggttgttcctttttttaaaataagatggtgctacatgtgtaagtttgtattaatagtatttagattggtactggatgagttatatacgcagtataggtatatttttaataagtagtttcataagcaatacattgcattttggacatttggtattcaaaagacatcaaatcattcaaacaggtaggccattttacttgcacacacgtcttgtgaagttgtatctagagaacaaatgctacatccatcgatccatatctagtactccctccatccacttttttaaaaatgtttgaccgttcgtcttattcaaaaaatttaagtaattattaatttttttc

SEQ ID NO: 50180 - DNA, 725 bp, Oryza sativa
cacgacgctggcccgtcgccttccccttctctcgtgtctcagcagccacgttgtcgctgccgcatcgcccgccggccgacggacctctcacccgggcaaccccctccccaccgccgaccggcctgccgatgacgttgcatcctaattcctaaccagacgagacgaaaggaggggagaggaaaggaagggagaggctggccgacgtggcatcctgacatgtggggcccacatgggtcccacactgagtcagccatcatgtcagctaaaaccggggtcaaaaccaccaagggatctaaggggatgcgttgtatccggttttgcgattgggggacgattttgtaactcgatgacaagttgagggaccttcggtgtactttttcctttaaatatccgaatccccggttgcaggaacggcccgttctttggtgggccgcacggaaaaaaaatagaatgggccacacgtgagcttcattcccttttcggcccaaacaatatggcccacactatcccacaaactcattctagcccaaaatcaatagcccgcacggtgcgtcggtgccacataaaaaaaccgagatttggagtgagagacatccctccaaatatatttttaagggaaaattaagagtttgctagtgattgaacatgtgacctcgaggctgaaatcatacaccctttgacactgcagtatcaagtataactcatgcgtcggtgccacattaccg

SEQ ID NO: 50181 - DNA, 945 bp, Oryza sativa
aacattccacttccttccaggacttcatgacaccatgctgccatccgcgagactacgaaccgtgccatctatgacaccaaggtctttcagatggctggatgagaaaatgtaaagggtagacaatgtggtgcagtacaagataggagatctctggatttttcttctagggcgatgctctctaccgatagtattatgctgccaggccagtagaactaatcggaacggtttatttatttttaagggtagattagtaaagtattaagattgattagggtaaatttgacactaatttttctcctcgtgggtcccacggtcagcgtcgctcgctcactcgctcctctccgtcgcaaagcagagttgccgcttcctcatccatcgaaaccgaacggcagtggagagcgcgactcaggctcgggctggaggtggtcggctcggaggtcaccacgctgggcggccaggtcaggctcgccttccttgtatcgtgcgggtctcgcgacgccgccgccgccatagcctcggtccgccacgcgctccagtccgtgctcggcaaggtcagctcaggcttcgacttcgcacccagtgcgtcgctgctgggcagcaaacgccgaaaggtctccacgttcgagtcgtcgagctgctcgtcttgacaagtttcagagatgattacgaagtaatatgcccgttgctcctttatttccagccaaagagatctgatcagttgcagggatttaattgctactgataagtttatcgatcatggactcatggttgtaaaagaaagatatatacaagctgaagtgagtttttctttaatttctttccttctttctttttgccaagattactgaagtggcttctcaacattggttagcacttagcattttgctgcttatctttttgtaagagcgttgtgctccaagcatgattaattaatgaattaccttg

SEQ ID NO: 50182 - DNA, 2594 bp, Oryza sativa
atccatgaattttacaatattcagcttgaaaacattaagatggattttttttttattaaacattgtaaacttgttcccacaaaaaaagtactccctccgtttgaggttataagacgttttgactttggtcaaagtcaaactgcttcaagtttaaccaagtttgtagaaaaagttaataatattttcaacacaacacaaatttattatgaaaatatattcaattatttatttaataaaactaatttggtattataaatattactatatttgcgcttaaactcagtcaaatttaaagtagtttgatattaaccaaagtcaaaacatattataatctgaaacaaagggagtatggtaaagttgcatctctactaccctcaacactcattaatattagttggtacaagtaagggatccaaattttaaatttgggaccagaaaaaactaaaaacaaaaaagggaattattctactaccatcccatcctaccgggtatatacagagtcccaactactagctgctaccaatttttatgagtgaaatacatacattttttatttttacaccagaattggatccccgacctctctcagcgtacttatcttttttccaactcacttacatattaattatgctataatatggaccttttttacttttgaacatttctatctgatatttgaaacacctatttgggcatttaaatgacttgaaataaaaaggttgtgaactataaaattgtaggtatcatctacagctacagtttttatataaagttcacctcgacccgatttcatatgaaaaggttatgatcatatgtgaaatttgcactaatatggttggggccatcagtttgagttatgaaccaatgcggataactcttgcttaaattgaaaatttatcagccgaaaattcttctagcgatgagtaggtattagtaagagcgggtcatgcctagaagcagcatttgacatatgtggtcatgtacatcagtgctggttttagccatgaaccgacactaatattactcatttgttctggttcttaaagctgtgagcagtaggggtggaaagcgtgtgggaagaggcacattagtgaacaggtagggtgtcacattgcaggcgttatgtggtagtgctcgaaatagagtctatacaatttctataccagatgcagtactatagtagtaatagttatgggtcaccctggaatgatttcatgtttggtgatataataacaaaccttgttaatctcagttacaggtcaacacgacgttcttctctcctaatgtaatggaccagctatatggtatgcccatgtgtgtccgtcgtacgtgcaaagaaaacgccggcagaggctaattcgactcttgacgggttgaacctacggaaatagtataagacaatttgaagacatgccttgtctatttgatcgattcttagtttggtcgtgtggtctgtattatattatacacctcttgcttttgggtctataatcggcaccaattttatttatatagcaatatatatacacatgcataaatatctgttaggttcaacggtacctaatggcaccgtggctactatcaacaggattttttttggaatacaaaagagttgtgcatcttaataagagaataagggcatcagcaatacgctcacaaaccggatagtaagcaataaatacattcttaattactacgtggtattaagcattgtgggagtagtacataactacaaccgggtcatacccctaccgccggaagcaaggaaatagaatatgtatgtatacagtgttttctgatagcaaaagaaaaaaaaaaaacaggctaccattgcttctcccaaccgtcgcatgcatgctctgtccttgctgcgatttttttaccccatgaaccccaccttaccgccaactcacggaaataagcaatgtggagcgcgtctccctctattaccacctgtcatctgggcccacgctaatacccatgtcgatagcataaattgctgatgccctaagagaggagagattttagtccctcccataaagacttgcttttgtaaaagggactaaagtttagtccctccttcctaaacaccacctaacaaccccaccgattcatggcccagtgcaagaagcagacctagcacaccacgatgttctgcttctgcgtgacgactgataatctgcacagatttttgaggcatcccttggacaactgttgatgcagagctgtgcaaatattttttatattcagtaattgactttgtcagaaaactacattcctgtcaccaaaatttaagtggtaccaaataatatcaccaactaataaggtttctttcctgcagagatggagcaaattgctgatgagaggaggtgcctggatacatggagcaaaagggttctcgaacgaccgagagtctgagaccagtcgacatcaggtctataatttgtttcttgcctctgctattaggctggctgttagttttgtatccctgaagatgttcttggttcattggactggatgtggtttgtggcctctgcagagtagtgaaacgctggttgtcccatccaggtaggattagttttggagattgctcg

SEQ ID NO: 50183 - DNA, 730 bp, Oryza sativa
agatcaatcactgacaaggagcactaggatctatacgtaatttctgaaaactttagtgcttggctgaaagattagaggagttcatctctctcacatgtagacaccactggtttaaaatgtttacataaaactccagtacgccttgacggtaggacagcgtacctccacggggctgtagctttttgaaaaatagttgtggaaataatatattattgggtgttaatttatatgagaatattatttgcagcctagatttactaaatacattaggaatgtccctataatgggtgggtcccgaaatttccaatatcacacgatgtccgaataaaatcaatattggaatagttttgttttacatcttgagaggaggccataaattcaaacggattttaaatttggtatgacatttggaaattgtgagctgacaaagattttagggagaacagccaatatggtccctaaagtttcgctcctggattattttagtccttaatctttcatattgtccaaaaaagttctttaaatttgtcatgtgggctgatatagtccttggtcccaccaaaattgccacattgacatgccatgtcaccttcctatgcaaaatctatatgatttgtccaatttacccttacatgtatcataggaaaataaaaaacaaaaggaaaaagtttttaaaaatatatggtatatgtaagagtaaaaatatacctaaaggagaagtatttttttc

SEQ ID NO: 50184 - DNA, 1208 bp, Oryza sativa
aaaaattctccgggccatatttgaatttttcttgtacgtattttagtgtttgccaatttcttttcgaattttaattaattctattattccttttagaagatgatttttatttcgggatgaatttatcaggacgtgacaaatccaccccccttacaagaatctcgtccccgagattcgaggaggctagcaagaagataggttgggcggtcttctcttcttgtctgacttcttccgctccgctttctataacaaacttgcctaacaaagcttctccactctggactgcttggctcgatctcctattgcagatggaatcttctctgcacctgacttatccctggttgaacctttagctgacttcgactgggttgcggcacttgaagatggggattcagttccagaactttgcatagttcatatctttggagtcaacctcatacaagttacccacttcatgtcatgcgtcgagatcagctcgtcattactaagataccatgcttgtcatttgcttctaactcgccaccaactgcctcatattagctttcctggtctccgggtgatagctacttctgctatttgatgcaagggtcgataactttgcctttgaattatgcttcccaagggaaccaacttatcccacttgatatactttgacgtcttcccaaatagttttactgctggacttcttattgtctgatcgttatccggccaaatttgaagcttcgttgttagatgtgattttactctgacctctgtagactatcttcgatcatatcacttggttcataactgggaatagctcccacgaacaagcaactcagattcactttctttatgttcagtttactttccgctattctcttcatgttgtcatcatttagcattcaacgtattcctgtgcaccttcagccttgatgtgttctttcccattggatcatctcccaagacatggcgtcgcctggtaacctgggcttgcacttttcactccgtgtagcatctgataccgagttgaagatttcactccttgccttcatagaaacccttttacctaggtcatcttgcttacttaatgacagggtgactgttgtgggggaggcaattactatcaggggtcttccttgagcgatgcagagcatgtttcttgttatcaatcaccttttccggctacttctttcatgctagagaacatctttggcaatctcttttat

SEQ ID NO: 50185 - DNA, 715 bp, Oryza sativa
taatcaacttgcagaataagcctaacatacatcataacagcaaaagacttagatctgttaaggtcctatccttagtttctaatctgtctctccccttcgttttccctctctccctctccaaacctttgcaacagatggctgacaatgagaaaggcaataaggtcaggagtcaagacattggtacctcaagctcccgagtgaatgaagcacaagacaccagttgtgcggcagtggtcccaacacctgattaaccagaacaaattgcttatagagatactacagcagcatcggatgccaattttgaacccgagtcagatgcaacctcaggtgcagttggaggcagtccaagcactcacaccacaagtcagcgcaccgccaacatcccagaaggcccctcatgccatgccacatgttgacccaaaagaagcaagtatcatctgttttatgtgtgatgagcaagggcactacgcaaggaactgtcctcagcagaaaagaaaagcaccaatgcgaaccgaaggtgaagttcgtaagatgatcattaccagcacagaatggccctcaccaggaatgacaagacgtcagagaagaaacaccttccgaggtgcaccacagttgacagagcatcttttagctaatggaggtagagtgtctgatagtgaagattcagatcaagtctctcaaaagatgaagatgagaaatctccccaagggttcaa

SEQ ID NO: 50186 - DNA, 1381 bp, Oryza sativa
cagtatgttacttatcatcgaaaaataattagccgtaaatacgagactcgtaccaaatctagcaacgacttgtacctgaatatactcatttcaccttgtttacttccccgggctggctattttaatttgcacagctacattttggcaaagtcatcaaaatttaaaactttcaactcactttttaaaactatatattttttaaaatctatccaaaagtttcttcaataaattagaaaccaaaattattttttggggtttaaatattggtgaaaatatcgtttgaatttcatcaaatttgattcaacgttttttattttaaatttatgatcaaataatttaatcccctttgattttacaaatgaatcttgtttgcatttttttattttacactagcacaaataagtatgagaaaggagcaatattgtcattttgaaagaaatggaataatgtaccaacagaatatagagaagatccaaatggaaactcaagtacatataaagaattggtacataaacatttttctactataattaatggtatggaacagaggagcaaatatttttttttaaaacaagtgtttctagaaaaaaaatggttaaatgaaatggggcatcaatgaaataaaaaaatagagtaatttttttaaaaaaaactacaaatagtaaagatacagatttaaatgttatatcacaaaactacaaatttaatactcactccgttccaaaatataagcatttttagttatgaatttggacattgtatgtctagattcatagctaaaacaatgtctagattcatagctaaaaatggctatattttgggacggaggtagtattacatttataacaaaacaatagatttaagttcaagtatcataaaattatagatttaataaaaatatcttatcacaaaactactggcttcaaatccatttaatcacaaaactataacacttatagccctatatgacatcaatactagagatctgatctataaaatctatagttttatcataacttcgatatatatcaaatcttgtgataaatttagtgttatatgtgatacaatgttttaaatctgtagtttttttatagttcgataaaacgtatatacagttttgtaaaatttactaaaaggaatatatttgcatgatggtttactaaaaagaatatatttgcatgattgtttaaatggtacggaacggtggagcaacgaaatttttttaaaaatatttggataaaattgcaaggtgcatttggtaaaaattggaacggtggagcaacgaaattttaaaaatatttggttaaaattgcaaggtgcctttggtaaataatggtcccggcggggctcgaacccgcgaccttcggctcataagatcaac

SEQ ID NO: 50187 - DNA, 1558 bp, Oryza sativa
atgactgtacttctactctataataaagagacctctggtgcttgtgatactctgtctccttgtgataccagccctgtttcctgggactggtatcgattaacaggttaatttggagcgtcacgggctagatccggtcgggactagttcggggcgtgacatgtatcgatcgctaaggtgcaacacaacaacatctagtacggttgtagttgggtcgtcaacgtttctcccaaatcgtagttatcatcaactcaccgaaagattgggccaataacagctttgagtatctccagaggagcttagggttcatcatgatctcaaccataggaaataacagatggcatagatttggccaactcttggagccgctcgatttggtaagatccaaaaaaacacggggagagagatgaataatggtgagagtgggcggttcatttctagaatagctggttctatagataataatgttggagttctaattacaggatcttaggctttactctacaaaacaatcacctcttgcttatgcggaaattaattgatctactgacctgtgtttgaagtcattgccgttcttctttcttattcttctagagatgcctcacgaaccccttccagtgcctagatcggtcgggcgatttatttagggtttgagatcaaagagagagagttcggcgtctgcctccttccttctctttcttcatctcaattagtttaggattctatttttttgtaccaatcacacaaaaaacgaatttatctcttagtttgtttcttgttagataaagaaaccggtggtttagatcctctccttacccttatcgacacaagtcgacaaaatcaaccaccattctcccctagattttgagacttacttacgagtctattaaataatatagctccccaaggcaatgtgtcttcaacaacattatgcgtcactgaaacaacaagacctatagctcactatagtactcaaataaactcaagcttaatttagtggatgttgattgaaaatttagtccccctcatccaggatctgagtaaggctctaatttacatatgtactggccagaacataatcttaattaatcttaattttatgagcctttagattatggatccattagcaaattcttagcttaataattcgatcctgggacatgtctttcacaaccatatcaatgtgttaggcagaaaacacacaacacattgctactagaatagaaaactgtgtttaattagtgcacaacttataacacagtatattttgggtggtttacaccttttgagtggtttatgagcactatttaccactcttagttctaggaaatattcttatgattaatcataacatgctttaaaatctaactacatcatcgactatgcagtaagagattattttggagcttttccatggttattgctcccctatgtgtggacatagcttaatcttagttaacttaataatctttataaatatccacacatctcacaaaataaagtgtacaaatgtctctgaacttctaaggtcattggactttagaaatatgagcatgttact

SEQ ID NO: 50188 - DNA, 1473 bp, Oryza sativa
gaacaaatgagacattattgcaactgctggagaaactaagtgtgaggtctccaacaacccttcactttcatcttcactccatcagttactctgagtgttcactcccctctttgctaccgtatggatggtgcgagattcctgttatgagctaaaaacatgcacaatggcattgagttaaactcactaagtattaagggaaaattcatcataagggatttatttaatttcatttatacctttcttgactaaccacgctgtgaagcgtgtgcaatttctctgccaatgtccatctgacgcacagaagtggcagtagggacttgtacttaaaaggaacagctgaagtggaggccttgatcccttcttgattctgctcaccctctggctcgctattcttattagaggattccccttgatagacctttttgcctttatcaaaggcattagtgaggttgagccggtctttaatcttctgcttttcagctttctggcgctcttcctcttccacggagtgtaagatcaattcttgtatggtccactcctctttctgagtgttatatatttttttaatggatcatagttaggaccaagagatctcatgatgatgtgcactaaaaatccatcagatattttcatatccatggatctgagttgatttgccatatgagtcatttcaaggatgtgcttccttataccactttcgccatcgtaatgactagtgatcatctcatttacaagcgtattggcatgagcctcaggtgcaaattcaaaactttcttcaatgtttgccagatacgtcttaatgtcattagagtcaatgattcctccaataacttctggagagatggcatccttgacataaattaagcacattctgttggacttctcccagttggctaacttcttattgtaggcccacatgagattatcatattcttccccaattatattgagttcttcggctggttgaggttcctcgggaggatcctctcttatggctaagtcataatccaacatggctaagttaataagcacattatttctccattcaacgtaatttgatccatcaagaagctgaatagccttaagctgtcctaatgctgaaaaattaattattaattaaacattagtaatgcatgcaattaatttccattggcttaattaatcacatacaaatgaatcttaattttcataatcaaacaccatagggtagaaaagattatgaaatggcaaagaataatgaattacggaaattaaaatcctaaatcaaattaccaaaagtaggtagatatcatatagggcataatgccattagtaaatgacatgaaattaagatccttagccatatcaccgttgggcagaaatggtaaaggaattaagcttagtgacgaattagagatccttgatcacatcactgtaaggtaaaagtgataaaggaaataatgcactaatggcataagtaaaattctaagtcat

SEQ ID NO: 50189 - DNA, 1700 bp, Oryza sativa
tttctagacgatattttcgttggttccattcaactataaataattaatatactaaggaaatgaccatcataatgatgttgacatgaaatcataaatactttctagttaaatttccattcaactaaaaataaattaagtggcttaaggaaataatattcttaataaatattgacatgaaattatattaacgttggtcaaatattatatcataccattaatttctttctagctaaacatcccgttggttccatttaactagaaataattttctaagtgatcaaataattgaccataattttccagcaatttaaatggctaagaaaactcataaataaatttctggaaataaataagacataaatggcgggcttaaaataataatgcggcccatcacttcctaagccggcccataaaaacaggctaaatacattttgagaaaattaaattcacgggcttaataataaattaaaataaaaggcccactcttattgaaaaggccagcccaaaatggaccggcctatttatgtgcacgatcggcccactctcaggcggatgcggccgagatcggcgtggcccattacggcgacggcccgacgcggaagcgaggacggccgtccgatcaaacggacggcttagattttgcccgcgccgaacaaatcgcatgccagggggaaatgggtgtgagccctaaccctagctcattcttctccccttctcttccctctcttcgacggctctctcaccctggcgagcgagcgagcagcggtccggcgaaggcggcgcacgcgtgcggcggcgagcgctgcagcggcttcatctcggccggctggggggcgcacccgtagggtggcgccaagccgtgtgccacggcatcgacggtccggcgaggcggcgcgcaagcgacggcgagcgtcgatgcggccggagctcgtcggggggggggggcggagctcgaaagcatccgccaagctgacgcttcccgtccctggcgagggatggtgtggagagacaagctccaagacggctgcgcacggggaacccgacacgaccgcgagaagctaaggtgcggcggtgccgcttcccgggaggctccggtggggttcaattccggtaagtcattcgaaatcaaaccctaaattgactctatattggatttaattcgggctttggtcttagggttcttagaaccgaaattagagttcttcgaattagggtttctaaggtgtggattttgggaatttcaatcttgtttatcccaaactcctcttttctgagctaaatagttggggaaaagtttgggaatttcaatctagtttatcccgtcttccccaattttcttcttaatccactgctagccgaagctcattcatgatgaaaaacttaatcatgtaagaacagtagattaatagaccttgcaataggccgagtagattaaaaaaaagttaattggtgattttcgatctgacttgaccaatcctcccctctaatatctggccgaagccatagcttcggtctgggaattcttagtgtgagagtttgggaatttcaatctcgtttatcccaatcctcattcttctcttaaattctactgctaagcaacgaaattaaattcttcaataactttgcttcttctactgttggccgagaccaacagtataacatggcttaatatgcaaccaagacttaaagaaattaatcta

SEQ ID NO: 50190 - DNA, 4190 bp, Oryza sativa
cgtgggatgaatcggattggaactagtgggtgcgattgcacgtggaatactagtaaaccgctacacttgtaatagtaagtctaacaagagttttagccttttgaatttatcccataacataacaatttttccaccaacactctcttatcaaccaatcataagtctctaccatttaatttctccatctatcttcccttctcaaccaatcacaaccttccaccatttaattttacctactttcttaataaccatttaactctaaaaaattcttatattatgagaggagagtagtattttattttctttgctaagtacttagcaactcctcagtttgaaaatataagcagtattaattttttatatggcctttgatcattaatttcttttataatgtatcaacaactacaatattaatattgcatgaaaatagtattaaatacaaatctaggtatactacttgcatgacactaagcattttgtttttagtttaattattagacatttttttaatattgactatgcgaaaaacaatgatgtcttatatttttcaaatggagggaatatatccaacgttcggacatcaaagcattaacaaatttaagaagttagtcttttcgtatcaaaacaagttaatttctaaagttcaaatttcaaaataagttgatttctatacccttatgtaacctcagtccataaatcaagaagttctatcatttcattacctttaggtacatcaccacccatactacttttctataacgaggagcactttagttaatttttctccttattgaagttgtctccggatgtgagggtagcatttactacatccgttctaaaaatttttctccttattagagactaaggttgagaagaaaagactttagcacctctcaataaataaggataagtggagttggaaagatgggtgggataagataggaagaaattcaaatggggggtgattggtgtaacaagtagtagtatgaattgtgctagaaacaaaattctagaagtttggagtattttggaacagtagttttaaattttctattgggaactttttatatcttagcattattctattgggccatttgcttaaatgaagaagttgttttaagttcggttcatgccaaactttaacaagatcccttccttctttaccatgtatgtgaagtttgctcatacgtaaaagtaaacttttcacaaattagctaaggccctattcggatttcgtgaggttggagcaattagccggttagcttacaagataagaaagtcaattaacgcatgattaattagtattaactattataaacttaaaaagtactgtttttagctttatgtaaaaaaaagacttgaaaagcatatatgcaataatctaagtaccaatagactgaagagagcgaggcataagattaattgagtattaataattaccagctcaaaaatatatttatttgactttttgaaaaactttttcaatataaaacatttacacaaacttctactctctcgtatttcacgggcacatttatcgaactttgttttttaaaaaaattctatagttactttaaaaaatcatattaatctattttcaagtttttttactaatacttaactcatcatgtgctaatgagccacggttggtatttcttaacatcacatatagaatacgcaagcgcacggaaaataccgatgtagcagttcacctgagagtattccaaggtatcgatttctacagggaatgtgtgtgtcagctcttcaccagattcgtccaatgatacaaagcaaagataggcaaagatagctcaatttgatcgtaacgcggtacttcagccactggccagccagctgctcccagatgtcgctctagtgcatacctggacagggagggattcagtgtaattgagggctgtcaccacctctacacccatctcagacctattgtgggatacgagaccaccatcagaaattaactctctaacaccatgtctacacaattaataactacttcagcgttagctaaacactaaagtaaccactatactttactggatcatagtggtcaatgatcccgcacgctaattaggaactaaccaagagataaatctcactgaataaatcataattactcagaatagtatttctattaaagcagagtaattaacagagtaaaagaaataagaagagaatttccgacttcctcttataattcctccgacttcctctactctactctctctctaattctagtatacaataaaatacaataaagtctcttataattcagctcaagcttgaagtgtgtgtgaaattgagtgaagtgatgtccttatatagacaggtaatgatggttacagaacgcgaaatgtttgaaatgcccgtaaccgtcatcaggagtgcatctggagcgaccacgccgaaccttagcctgaacggctgagattgtggttcagctgaaccaggcctggttcagccgaaccctggtctagcccaacaggcccataaattggtttgtatctcctttgcaacttgccttatccatttcttcgagagttgggcccattttccaatgttgaaatagacttttggagcccaacacttgcatgaaatagtctgaatttccttccaattttggtggtttattacctgcatccaaatatacacactcgtggaatatgttagaattaagcactaccactatgttagatgttttatttcctatgttttatgcaggtattggcggcataaaattggcatataactgccgccaatagccactccgttttgcgtatgcaggagagaagttctcaaacgtaccctttatcttcatccgagtcgtagaagcgaacgcaaccgtagccgctccggattgcagtgtagtactgtagtgtagtatttaaagagggtaccaaagttgagtgtagtaatgtactttggacagtgttaaaataaattcaatgcagaagttgatttaaaatatcaaatacatctatttttcaagtttgtaataattaaagctcaattaatcatacgttaatggttttctcattttacgtgtgttgacttcatctttatcttaatttatattaatccatcttaattactagctccatcaaaaaatgtacgtattttaaaggttgacacaggtactaagaaagtacgtggaaataattggagaaagtgtatgattggatgagaagagaaagttagtgaaggagaatgattgtgattggttgagacaaggagacaggtgataaaatagtttcattttagaaaaggtagcttgaataacatggatggaggtagtaattaagatagattaatacaaattaagattagaaagagttagtgcacgtaaaacaagaaaatcattagcgaataattaattgagttacaacttgaaaaataaatttatttgatatattaaatttcctttaacaattacaatgtttaatcgtttaaaaacgtactaattaaaaccaaagataaaatctactactccatccgttttagattataaaacgttttgattttggtgaaagtcaaaatactttaaatttgactaagtttatgcacaaatatagtaatatttataaataccaaattagtttcattaaatcaataattgaatatattttcataataaatttgtgttgagttgaaattattattatttttttctacaaacttggtaaaacttgaagcaatttaacttggaccaaagtcaaaacgtcttataacctaaaaacagagggagtatagccctgtttagttcctctaaaatgacaaaagttttgatgttttgaagcactttttgctacatggataagcactagtagcgcaatttgtcatttgtcatttgggagtttagggtagcaaattttgaaaaaaaaaacgttgggagtcgttctctctttctttactagtaaagtggcaaaactttaccctacatctaaggctctgtttagatgggactaaaattttccctatcacatcggatgtttggatactaattataaatattaaacgtagactattaataaaacccatacataatcttggactaattcgcgagacgaatctattgagcctaattaatacatgattagcctatgtgatgctacaggaaacattctctaattatggattaattaggcttaaaaaatttgtctcgcgaattagct

SEQ ID NO: 50191 - DNA, 1366 bp, Oryza sativa
tcctccactttgtcatgtaagatttttttggcaacataagttcatgttagtttggtattcatctaaatgatgtgtaaattaatttgtatatgataggtaaagggcacctctaccgtccctaacatagaaagaaccagagatagatcaacatcactatatagataatcatcgttatgccttcataatgatggtagcagttactggagattatggtatacccacgctgcacatttcttcctgtgtattcctgcatcacacttctgatgaacattttggagatgtcaagatcaatttgatccatccatgagagaacaccataagtggtgtgccaatttcatatgtttcttttaataactattggtgaagtcaatagggaacaagttcagaactttgcatcattgagcaaaggagccttgctgaacgactcatctatcattgcaaatcataattgttcaaaaaagaataatatgtgcatattattcagaaggggcaaactaagcagcagaaatagagaatgtaattgaaagttacccaatctcacttcatgtttgacctgtaacttcggacatggaattactgattttgaaatccaattatttagtctttcatccgcatttatgctaagaaggaattagagctcatgtttacattgtaacagcatttggtctatattgtaatggaaatggatgataaataacaaagaaaaacttctctgttttggagtttcccatttcttgcaaacactatccttttgtatgactaattcatgactgcacctcaccttgatgttttatttgtgtatttatcagttgtgaattgtctatagaaatcagatgtaaaaggagaatcaccaatctgtatatgcattttctccgcttgcaattggctctatacatttgtgtcaaagttctgagatctcaacctctgacaacaaaaatttaaatgcagagttcacaagatgtcaacaacagtcatgcacacccaacaaacaaagaagcatccaaagacaaacaaatatgttgctttccactcagaaggctgggttagattatatggtctcttttatttttctccggcgattttagggcttagtaaataatagcttattcgtttgattcttatcttcgctgtgttgcctttgtagtacttccaatctgtattaatgttgttagttatgtttgcccttccaatctgtattagaggatgcctttctctacgcatctaattctcgagttaggcttgctgattgtaattgggactatcattttctagcttggaaaataaagcagaggtgttgttgagcagtgatttttttttatctcaatagtacgagcacatgtaacatgttcaaacaaccctttttggg

SEQ ID NO: 50192 - DNA, 552 bp, Oryza sativa
ttccctccgcacgaaaaatagagcagtctattaacatgtgattaattaaatattagctattttttcaaaaaatggatcaatatgattttattaaagcaactttcgtatagaaacttttctcaaaaatcaaaccgtttagcagtttaaaaaacgtgcgcgcagaacacgagtgagagaggttgggaacacagggaaacaaacacagcctaagaaaggattcaatccaatcttatctctaattaattgatatgggttacctacaggtctacagcccaatgcccatgacaacaagtaaaaaaaaaaaggatgtttataggttatttagttgtaggtcacaatttcttaccatggtctactaacaaggtaactagcacaaaagctaggttactagtagaggaaacattggagaacaacagcagagaacttgggttataccggcctgctactgatggacttttattttttaagacttgatatattacttcttttttcttatatcagttacatcatttcagcgcaatccagatgcttgtgagtcgtattccgaagttt

SEQ ID NO: 50193 - DNA, 1021 bp, Oryza sativa
tgacttttaaatgccgtttactgcaaaacttaacctctatgttattatccccttgtactcccttgcattaattgtgcatctccggtgtggcttgctgagtactgtggttgtactcattcttgctcaatcttttccccccttcagtaagagaagctttggagaagatgtcttaggtggagtcctggcttataccccagttgagcgcctgtgaagatggagccgtaggcccgctagtccgctgctgtttatttttgattgtcaggccttaagtgcctttgtaataatgtaaatattatcgatataataaagatgtgtcttttatatcatgtttgtgtggtgtaccccggcttttcctgggacggggattaatacactagcgttcgggaaaaggcaattttcccggtcgcgtcaagctggtatcagagccatctcgactgtaggataagccaagtggataaaacctaaggacatattttataaataaaactatttgcgaaagttcctctttttctccttcccctaatgctatttgcaaagggtttactcttttctttcttcttcaaatttcaactagtactagatggtcagctttgcgaagaagaagatgtcgtcagttgtttgccgaagctccggaagactgcaggatccgctagcgaagcgaaggaagcagtgaagccagctgtgaagcaggagtgaagatcttggagaacccgtcgcagaacctaagccaccctctagtgtttcgtttgtcgtgtgtttccttgcttgtgtgtgtagcgcgtggtttgcatcagtggggtgtgatgtaaccatgctaggttgtttgcttaatcaacttgcagaataagcctaacatacatcataacagcaaaagacttagatctgttaaggtcctatccttagtttctaatctggctctcccctttgttttccctctctccctctccaaacctttgcaacagatggctgacaatgagaaaaggcaataaggtcagaagtcaggatattgggacctcaagct

SEQ ID NO: 50194 - DNA, 2046 bp, Oryza sativa
tttacacgaagcagacattccaatcgtattgtggtcactgaagcaaacgcggtacccgtaaggcctcgtgatatccagaccccatagcagaaacaatgcacctatgctcctccagctgcacttgactcggcaataaatcatagcaaccactctctgcatcgacagcctcagcaaagaattgtcgtagatggaagaagttgtgtctctccccgacctactccaggccgagccaagggcaatcaatatccggagggcgataccaagcagaagaccgtcatccgcttcaaccagcaatcaaaggaagcttctcctgtgaatgatagcattatgcagtcctatcacatcatcacagaaccaatcaaggatgcagtcactagaacaatgccagctatatctctccagaatcaaaatgagcagccatgtttgtggttttcagttcgctacttatcatggggtaatcgaaagtttgcagcaataatgcaatacataaatatattcatgtctataaacagtgagcttgctatgcttatggatgattcatgttgaggatacaatgtaccgatgttaagcaccgtccctttttgtttaaggcagtgcctcgtattcatgtaatgagggagaaatgtgtaatacagacaagttccatgaggattcttttggaagatgcggatatgtgattatgtgtataattgcttactgataaaggagacctagggtctcatttcaaaggaactatgttctaacctcgagttaataaccaacctgttgatggaaaagaaaaccaattaaactgtgttgggttaaaaagccaatgagacagtagttggggaataggagtttggatacgccttttacagatcaagataaggattgttggatgaaacccataagggtacccgccatgcctctacattgataagttcggatatacctgcaaacagttaagaagatccaggagacatcaatatttgagaacataatagtcgatggttggtaattagtcgatcaggtatcagaaaagggtcaaaggtgatatggcagaagaacaatatggatgctccccatcccaaggaagcactaaaccctagtggcatagatacagatagcaagcaatgtatttccctgaaggtagtcagtgcagctttttgacgaaccacatcaaggtttcaccgaaaggcagcaagccaaaggacctcatcgtccccagaagcgtccgcaatccacattaaagaataccacctgttagagataagccgaaagatgattgataaaagggattggcaaagatgctctctatcatgaaagaagtaggccgaaaggtgattgataaacagaagcatgctctgcatcgctcacggaagacccctgattgtaattgccccgcaacagtcaccttgtcattaagtaagcaagatgacctaggtaaaagtgtttctatgaaggcaaagagtgaaatcttccactcggtatcagatgctacacggagtgaaaaatgcaagcaccggttaccaggcaacgccacgtcctgggagatgatccaacgggaaagaactcatcaaggttaaaggtgtaaaggaatacgttgagtgctaactgatgacaacatgaagagaatagcggaaagtaaactgaacataaagaaagtgaatctgagttgcttgtttgtgggagctattcccagttatgaaccaagtgatatgttcgaagatagtctacagaggtcagattaagatcacctctaacaacgaagcttcagatctggcaggatcacgatcagacaataagaagtccagcagtaagactagttggggagacgtcaaagtatgtcaagtgggataaattggttctcttgggaagcataacttgtagttagagtggttgaccctcgcatcgcatagcagaagtacctagcaccggagaccaggaaagctaatatgagacagttgatggcaagttagaagtgaatgacaagcatgatattcttatgatgacaaacatagtatcctagtaatgacaagctagtgttgacgcatgacgtgaaatggt

SEQ ID NO: 50195 - DNA, 700 bp, Oryza sativa
catgcatgaagtaggattgaacaaccctccttaatgccatccacaaatcaactaaggcgattgaagagcctggcctccttaatgacaacgattgagctttagttgacaaagtacatatccgttctattgttatgagtaccaccgtcccatcattactcaccgacccttggagtttgatatcttcttttgccttaccatcggttgaaatatatagacacacacatctaggaacatgtttcttagaaaagaaaatatatacatcttcataatttagtactactagacaacagagtttataaagtttttaactataatttcagacttctctttggagtatatttttatttgattataatatattactgtacacaaaatcccacgacaacgcgcggggttctatctagtttagtagacaaatctagctcaaggcctagctaccctaagcttctctttgtgctaggccttgagctagactttaattattagaattgtctttgttaattggctcaaggctattgtttttctaataaggaaattaacaaaatctattatattattaaaggaatagaaaaaggagtctccacgttcgctctcatggcttagaaattctcacattaatcgaagaaaaagaaaaatcatagtccatattgaaatacaatttagaaatagctgaaattcggaattaaaaaataagaaatat

SEQ ID NO: 50196 - DNA, 1098 bp, Oryza sativa
gcattaaccatgcatctgccggtgtgacttgctgagtactgtggttgtagtcattcttgctcaatcttttccccccttcagtaagagaagctttggagaagatgtcttaggtggagtcctggcttataccccagttgagcgcctgtgaagatggagccgtaggcccgctagtccgctgctgtttatttttgattgtcaggccttaagtgcctttgtaataatgtaaatattatcgatgtaataaagatgtgtcttttatatcatgtttgtatggtgtaccccggcttttcctgggacggggattaatacactagcgttcgggaaaaggcaattttcccggtcgcgtcagccgccttcccctcctctcctcatgggccggccacccggcccaaccctagccgcgcccccgcccgtgcagcgcgcgtgcgcgcgctgacgccgccgcctgaccggtgggtcccacgcgccaggccgggcgtcgtccccttcctcccgcccggccgtcctctctccctctcccgtgaaccctagctcgcttcctcctctaaatccgctcgattcaagcatgggattcccaaattgattagggggaattaatcccctttccctcctctctctttcccccttaattcccccttgaatggcgcccccaatcgccgggaacggacgcgccaagtccggccgccttcctttgccgccggccgccattcccgtcgccgttccgtgtcgcgaccgggaaaattgccttttcccgaacgctagtgtattaatccccgtcccaggaaaagccggggtacaccacacaaacatgatataaaagacacatctttattatatcgataatatttacattattacaaaggcacttaaggcctgacaatcaaaaataaacagcagcggactagcgggcctacggctccatcttcacaggcgctcaactggggtataagccaggactccacctaagacattttctccaaagcttctcttactgaagaggggaaggattgagcaagaatgagtacaacaaaaagtactcagcaagccacaccggagatgcacaattaatgcaagggagtaccaggggataataacata

SEQ ID NO: 50197 - DNA, 907 bp, Oryza sativa
ttttagggtttttctttttataaaacctttttaactttgtttatttcttaataattattatttgtgctctgaaaattccactaaaatttgagggctctttttagactaaggagaatttaacaaaaattctccgggtcacatttgaatttttcttgtacgtattttagtgtttgccaatttcttttcgaattttaattaattctattattccttttggaaaatgatttttaattcgggatgaatttatcaggacgtgacaaatccaccccccttacaagaatctcgtccccgagattcgaggaggctagcaagaagataggttgggtggtcttctcttcttgtttgacttcttccgctccgtcttcacaaactttcagcaaaacttcacgactcggaactgcttggcttgacctcctgttgcggatggaatcttctcttcacctgacttgaaccagggtgcaccttttagctgactcagactaggttgcggtagtttaatgatgcttccgttccagaacttctcatgattcatatcttcggagtcaacctcatacaagttacccacttcatgtcatgcgtcgagatcagctcgtcattactaggataccatgcttgtcatcatgagaatatcatgcttgtcatttacttctaacttaccactgaatgctttggactatgatatcacgcttatccagcataccatgtttgacaacttgtcactaactgcatcatattagctttcctgctctccgggtgctagctacttctgctattccatgcgagggtcgataactttgcctttgaattatgtttctcaaccgaaccaacttatcccacttgacatgctttgacgtcttcccaaacggctttactgctggacttcttattgtttgatcgttatcctgcc

SEQ ID NO: 50198 - DNA, 1169 bp, Oryza sativa
ctccaagcatggcagcctcctcgacccctccgtagcctcggtggcctccatgacccgtccagatcgaggcgccaccgaggagagtgtaaaggtcgtgccaccactcgttattgttgctctaaactacgggcaccggcgaggagaggggagaagggatttggcgccggcgaggagagtagagaagggagatccgcgagccccgggttggatttggccacgccactactctgcctggtgccgtcgctgcttgggtcatcgctccccgtcgcggcgcggtggactgaggagagcacaagcaacaagcaaggcaacaagcaaccaagaagtcacacatggagaaaatatgaggaaaagtcacaaaagcttgctgcaagcaaccaagaagtcacacccacgtggagaatatcaggtactaccgcacagtagcgtgctacatattaccaacctaaaaaaaatacatcaaaaaagtcaaaaacaatatgaaaaaaaattcgagatgtgaaacactatgacatttgccatcacacaaaacatcaactcaaaatacaatgtgcacaatgagaaaaagaaacaattttgttctccaatagtatttaaacaaatcagttttctattccactgagatttgtcattttttctatgtgtatatgttgtattttgagctgatttttttacatgtcataggtggtgtttggatacagggactgatcctgtcatatcagatgtttgaatactaatttaaaagattaaatataaactaataataaaactaattgcataaataagagctaattcgtgagataatttttttaagcctaattaattcataattagcacatgtttactgtggtatcacatggactaatcatggataaattatgctcaatatattcgtctcgcgaattagttcaggttatggattgtgttttttcattaatctacattttctacttctaatgaatcaaacatccgacggtaactaaaatttagtcctcccatctaacagccttgcgcttgcacctctcaaaatttttctattctttttttttttgactttttcggtgtatttttcgataaggggactcatctctcaagtgcactgcttctcttcgtctcttcccccatctccggcgagccgtactggtccaactccggcgggcaacgacccc

SEQ ID NO: 50199 - DNA, 548 bp, Oryza sativa
ttaggttttatccacttggcttaacctacagtcgagatggctctgataccagcttgacgcgaccgggaaaattgccttttcccgaacgctagtgcattaatccccgtcccaggaaaagccggggtacaccaaacaaacatgatacaaaagacacatctttattatatcgataatatttacattattacaaaggcgcttaaggcctgacaatcaaaaataaacagcagcggactagcgggcctacagctccatcttcacaggcgctcaactggggtataagccaggactccacctaagacatcttctccaaagcttctcttactgaaggggggaaaagattgagcaagaatgagtacaaccacagtactcaacaagtcacaccggcagatgcatgattaatgcaggggggtcaaggggataataataggggttaggttttgcagtaacagcatttaaaagtcacttagttgcccaaagctattttataaagacgatcttagagcttcacaatattaataatcaaagccgtggaccacacgaaccttgct

SEQ ID NO: 50200 - DNA, 1401 bp, Oryza sativa
tagtcgattaacaaccggcaaccacgtggaatccactagccaaaagaaaagaagtcggctcgatccgatacttcgagcaaccccaaccctagcctaatcccctaatacaatgttcaaaaataaccatttttcccccccccccaaaaatttttttttcccccccaaaaccccaattaatccaacacaatatcgattcccaattcttcatatcaacagttcaactcataaacaacaaataatctccggatctcatatcaacagatgaacaacacatccaacatgaacaagaacaatatcccacatgaaccatcaataatgccctaagttgtacatgcacctgtagccaatccatcatcagatccgtcagcagggccaccatggagaaggggagagggagaccaatggcagtgaccttcgtcatcatcgtcgctgctcctgctcattgtcaactcccctgagctcgtggcggctttggtcgcccttgagctcatcactaccgaagcttgtcggcgttgctcctgctcatggttgtgtggaggtggcggaagtgagcggagaggccgtgaaggtgaggcagtggtggaagagaggtgaagtgacggtggaagagaggcaatcggtaagcctggatgatgctaggaacgatggcaaatgctgcccggcctgcgccacctgcaccggcatggccgaggtgactgcgtccttcttctccatctccatgccgagctccatcgatgagcctggacgatgttgctcctgctcatggtggaggaggctcaggaagagggcgacgtgtgaggaagacagatgcaggagaggaaggaggtggagtgcggccacaacggggaggcggcagaggtgaggtggaggaagagcggaagaggtgtagcacgatggcaggggaggtggcgttgcggcagaggaggaatggggagatttggcgagtggcagacgggagggggacgaagaaaaggagaagtggtaggagggagaggataaagctcggcttgatcaacttggcttggtttttataggtgcaggtttttaaaagagttggcacctataatatattataagtaccgattttttaattaatcaatatatatatatataaagtttataggtgtcagttttttaaaaaaccattactatactacgtcccagcttttacatcctatggagttagaaaacggttaataggtatcggttttaaataagctgacgcttattagccagtctctattaggggtttatttgtagcactatatacttttaataggattgtagtgatatcattgaattgccgttgacctccgtcttaaggagacgttttttttttttgcgcgtgagcgtgatgtatgtacgtgttccatgtaaacagggaaaaatgtcattaataaa

SEQ ID NO: 50201 - DNA, 701 bp, Oryza sativa
caattgtggtgccaagattttttgagctcgaggcagcattgcctgtttcgcacctaccaaagttctttgacttctgaaacgcttccaagatggaccgattttgagggaccgaacttgttgcctgctggtcgctttcgttgttaggaggtgagctgttctcctttgcagaatgcaggcgtgaccgtcttttcgccgatgaggtaggccctttgctaccagaggaaggagagctgaatttggccggtttctgaagcagagatggaagccgtcttctctttacagactcggcacttccctgattaacaatggaactctcctgaaaagaacacaacattacagtacagggtggtatgtaaaatgcccaaacatttgattccgctgcacattacgaacaaaatccccacataatttgatgaacagaaatgtcaccttcaatggttgcttgtcgtctgcatcagcaggcacggaattgtcagcacaaggatcgggagtagcagcctcctgcttctccatcgcttgcaacacctctctcgattcaccagcatggacaccatcctgcttgtgatgcgcggctccatccgcatccactccgcaagaggagccaaccccaccatcggcgatgacatccagctcctccatctcttccaccggcccagcagcgacaacgcccgaaccaacgacgcagctcgtcgtctcctccg

SEQ ID NO: 50202 - DNA, 543 bp, Oryza sativa
atctatccgctctggtttgattcgatgcccaaattaccagtttccgaataggagtcgtaggaggagtaaattttaatttcttcctagtttccgactaggatgggggccatggtgcgatagatatgcgttatactccctccatttcctaatagatggcatcacaacaaaataaattataattacgtaaatttttttataagacgaatggtaaaacgtgtaacaaaaagttaacggtgtaaactatcactacaccagatcctcacacctctgacgggataactgtgataggcaaacgaaatggtcactgatgaccgtcacctttgacgggtcatacgggatgccgtcatcggtgagtcatccggctgcgacccgtcacaggtaactagtcacttgtgacgggtttacctgtgacggatcgcagccggacggcccgtcagaggtaaggtttactcacctcaaacggctttaagtcttagcccgtttgagatgacttctgccactatatatatatatatatatatctcctctcccagcggggcccat

SEQ ID NO: 50203 - DNA, 587 bp, Oryza sativa
gtttgatactttgattgattatctcatccattcaatgggtaatatctcttgttagttacttggtttttgagcaagttcctttttattagcttatataatcatcattctttagaaaattatagcatggattcccaacaaaaattacggtacctatttcatgctaatactaaatatctcaggaccacacatttgagaaggtgcctgggaggtttggaaacatgttcatctgaggtgtgctgcaaaatttggtctgggtttaaaaacaataaagaggtttcctcttcttatcctgtgtagtgtttgtggaagtaatttgatgctttcaaccatatcatgcttcgtcttacttttagccagctatcttcatatatgtaatatggtaagaaatgcatggactgaacctgttttttgtgtcacatgtaaagcccccttttctgccttatttgcagaaccataactaactggctatttactggtgagaatctttgtgcaatgctatctggaaagcttgtaactgggctaatttccaaacctagctgtttttgaacaccaacatattatttactatgctgggcaaacatgtagaa

SEQ ID NO: 50204 - DNA, 590 bp, Oryza sativa
gggcataactttttctcccagatcatacgatcaataatacactcggcggatcaatcccggacaggagtagggtattacttctcattgagaggccctgaacctgtataaatctcttgtcttcaaacccatccatttttcctgcttgatagccatcctttttattgccgaaatcttgtttcgacactcgtcatctacatacacagcctaatgctttgctgtaaagattgcaaaggtacaacatttgaagaaattaaagtccaattaagctagacattgccttttgcctccctgtaagaacgaaaacagcttgcttacgttaaaaccggccactaattcgggctagttgtcgtttgtgcgcttgaattgtaccatgagtccatgagcacggccatcactcatcaacatttgctttatctacgaataaagcaaggttaggagttgggaatgcatgggccggtcagcaaattaatttgggttatgacattatttaggcccattttgcaccaggcccactctatccttgccaactttatgttaagctcctagggcttgatcatacgtggtttaaatcatcaccgtgctgccaaaaa

SEQ ID NO: 50205 - DNA, 1096 bp, Oryza sativa
gagactgatggaatgatatggatagctgatgacgatgatgatgattcatgctgagggaaaaagattcagattggtgtgtagtttgtgtgtgtgtgtgagggacaatggcagggagcagcaagcagagaggcaagaggcaggtgagctgttgtgtttgcttggttgcagggcaagctagctgccaagatgaacaacatgcatgtgtgtgtgtttttgtggttgtggggctgggagtgagagagcagaaagaatctcatgctgccttttctgcagttggagattgtggttagaggggacttttaacggattaggattcacgtccacggtgacttaatcattgacatgtgagccaaggtttagagcaggtacaatagcagactataagctagctgcaaacatattttaagaagataaataaggagagaagggtagcgggctacagatttgtagccagctgtagcacggacttcaagacgcaatgtgtgtatgacatgtgagaccaggtattaatagagtagtatataactattgtatgaatgagctattagattggttatacatgaattggagctagtagttggctatactattaaacttgctcttatggggccaatatattagtgacaattaatgtcacctgactttgaaggttgaggatgctagtttctttaaaacatgcatgtagcatactatctctatccataaatataaatatttctagcgtttaaaatttttccttaaatataaacatttctacagtattatatcattgagtatgatgtttctcaaaatatcaagttttggggcgtatcaagcaatttcacaacaaccttaaatccttaattttcacgtaaaggcttatatttgtggacggatgaagtaactactgtctaaaatcatttaactttataactaatgtttgagggtaacccaaatagaaacatgctcctataggattttctctttaccggtgttcagtgttgtgcatgcagggctgcatcattagtgcatgcattgtgctaggccaacttttcacatgcctgttaattttaattaactaaaagttgatgactctggttaactcctactagtacgg

SEQ ID NO: 50206 - DNA, 1048 bp, Oryza sativa
cctgccatcacatgcgtccggtgatgatgacaagaaaggatgagtggtgtggggatctactcccaccgtcccatagaaaacgaatatagaatcgaatatgacacattctagcactttgaatatagatagatatatgtttagattcgtagtactaggatatgtcaaattcggtaatagatttattttttatgggacggagggagtactattttgtggaattgtttgccccctgatgacctattatttatcgtaacaatgagataaactagtaaaatcataaaaaaaatgttccaaaaaaatttagataacatattattaggagtttaggaccacacgaaaaatttatcaacaaccaggactatctagtatttcctttttcatcagaaaaactgatttatatcaattcatatatttttagttttctgtgtggaacccagtgccttcttaaaaaaagtatcactactttttttttattttcaaaaggaccattatgcccctccgcatgcccggagcagttttcccattcagcctttctcccgtccacgcgccatatctctctccccctcaacggcgacggccgccgccctcggatcccggcgagagacaaccttctaccttcctgcccccttctctccccttcgagttccaccccttgcagcgccgctggcccgcccccttccggcctcagatctgtcaggcacggctatgattgacgcgcgggcgatacaaggtcgtgggcgcggcggcggcggcggtggccgcagcggcggcgactcgaagctgtctacgcgagcttgccggaggtcgagattatcttggtcgtgggggacccagcttcagcgcgtcgcggcctccacctaccttccctaagattccctctcgtcttctcctcctacttggtttcttgggaccaagagaaattgtacgccatgctgcaagaattcacctcaagtttgctttgatttcttaatctgattcgccgtccacacacacgatgcgatcagctaggctcggccaccgcccgttttgggattcttttccccttccc

SEQ ID NO: 50207 - DNA, 693 bp, Oryza sativa
taatgtaaagacatttctccaaatattaatatatatcaagtaactagatataagtaacacaaatcacatatttacatttaattatatgaggttgagatggttagtacattgaagataaaaaatgatcaactcaagaggtcatgagttcaaggattggtaagggataatatttttctttctttttcatattgatttgctatatttgccgtaaattctttctttttcatattgatttgctatagttgccgtaaaattcaccaaatggcacttataaaacactcttcaaaatgtctctataacatggtaaaggcattttaaaaatgtctttatagtattaggaaggcattttaaaaatgcatgtaaaggcgttttaaaaagacactcttcaaaatgtctctataacactgtaaagacattttaaaactgtctttatagtattaggaaggcattttaaaaatgtctctatagtattagtaaaatctctctacaaggtatatttgttgtagtgcaaacacatcctaattagaatatccgtaaattctttctttttcatattgatttgctatagttgccgtaaaattcaccaaatggcacttataaaacactcttcaaaatctctctataacatggtaaaggcattttcaaaatgtctttatagtattaggaaggcattttaaaaatggggctgcagga

SEQ ID NO: 50208 - DNA, 815 bp, Oryza sativa
tccaatatgtaatgtgtgtatgacaggtgggaccagatattaatagtgtggtatatattataggtaactattgtatgaattgactataaatgatttggagccagtagtgggctatactattaaacttgctcttatgagagctaacattctttatttttgtaattttctctcacctttacataagtttatagttggcttatagcctagtattaaacttgctataagagtttgttcgattaattcctatgaaaaaggattagagaggactagagaagagattcatgtaaaaatagaaagtggggagctccaaataccgctcaattctctagagagggattaatcgaataaggtctaagtcatgtgcacattcactcgaaagctctcttgtatcgtaggagtaccggatcactgaaaggagtaatgactgagtattactattgtatgttatctacttccttaaaaatctctagtataaatcggtagtaccctgcatgcgcaatatagagcacacgtatgtttggacaacattttctcgatatggtttagactgtttcaaaatacgtgaccaaaataacaaaaaatagttttggactgaaattttagtacttgtgcttctagcaatctagaagacaagattgaaaaagataaaaataaaaataaaaaaactcttaaataaattctagtatttaaagttgcctagggctcaaacaagcaactcatttgccctatgctaatgcgatccttaggggtatgatttgatgataaaccgagtatacatgctctcacaactcgtaccatcatctgttatttaataa

SEQ ID NO: 50209 - DNA, 780 bp, Oryza sativa
cagccagaaacacaaacacaacaccaactgcattattacctctagaaaaaaagagtctcttagggattatgaaaaaaaactagtcatttactcaagtaactcagctttctaaacaagatttatcatgcaaactccaaaagtctaaatagaggaagaggcccaaaatatgatataaaattacagatggctcactaagaaagctgcaaatcactggccatagcatgcccatccacaatttatttgatactattatgccagttccaggatggcatatctcgttataaatggttgagaaagtcatggtctatactacacttgtattcaatcaacaaattcatttatagcgatccgtatgttcaaaagatctgctacagactatgttttcttatggcgcgtgctagatctacattactgatatggcactaataatattacttctggttcaacttgacaaatcagtatgctaccatagaattataaatacagggatacatgaagtaaaaaacatctagcaattttaccaacttccaattcagatatcatttcacatcacaactttaaaataataataaaaaaatcagaacgcatgtattgggaccaaagcggtcgagtgagccacacttgatgtaaagaagaaaactgtgtggtgatcaattaatcatccataaaaattcaaggatagcaccaccaaacagaattagcacaaaacttaaaataaggcccggaaacccttttcttgttcaaaactgcctcaaatattcagccagctaactcctctct

SEQ ID NO: 50210 - DNA, 513 bp, Oryza sativa
gggacatctataggtataaatacaaggccccctagaagaagaggggacacaaccaacagacacggacaacatagacgccacaaagccacaagccaatacaagcctacataggccaagacaagctgctagatatcgacatcagagataagcctaggaaaacccgatatggacctacgggaaccaaagagaggaatctagcgctatctctgatctcgctggatgcggatttgaggaggaaggctaccctgttgtcgactacgagtcagatcttcaggccgccacgtcgacaacagttagataggctaccccaaatattgtactggtgtgattatgatgaataagatcaacgaccggcttcggccaacaggatgtagggttattacctgataattcaggggcccgaacctgtataaaaatcctcgtctctatctcttttacctcagtctcacgtatatcttagtaccaacaatcctcatactatgcaaataccggaatcgcgacatcaaatgtcga

SEQ ID NO: 50211 - DNA, 534 bp, Oryza sativa
tgcagccccaatccacgtcactagatggtcagctccaggaaccatccgcgtcactagatggtcagctccaggaaccttggcattgatggaataagccttgtgctcttagtagccttgttggtttttggtctttgtcgttctgttttgcttttagcatcttaggacagcatcctttcagttttacttttagcatcttaggacaacatcctttcggttttgctctttagcatcttaggacagcatcccttttatgctttatgttttcctttcacctttagactagcccgcagctagcaagctatggctataaatatgtatccaacctcccccggatagtatgacttggtactagagccactctatcctgtagtctagacatctcttgctcatccccttcacgagctcccctctgtcctcaaccggcagatggaacatccgctattcctgctcatccctcttcccctgcactgacgagcagcatattgtcagacgctaactctacccccacactgcatgcccccaatagcatgccat

SEQ ID NO: 50212 - DNA, 917 bp, Oryza sativa
  unsure (1)..(917): unsure at all n locations
tcacatgatttccaggaacgtaagagttcatttaaccactttaagcactcgtcaacttattatagatgatagcccattaaattctgaatctcatatgagctcatcgccaacaaaatattttagatacaatttttgtgcatcaatattggccatgttgtgttacgcattcctggtaatgcatatgtgagctcatatgacagttgataatgagctatattctataataagttgattaatataccaattgtttaatgaccnatcacttannaaaanannatntngnnccaacctttggggggccccccaaanaagnggggnaaaattttcgaactcaactaggtggcaagtttagacatcttaccactacaccattnangnncanangggatgggtcgtgnnnnatgctnnnnnnntatgactctactctcacggncacttccccttnnnnnnnnnngnnnangtggattttgtgccacttgtgccatggtatcaatgntaggatctttggtgacaaganntattgaggatgtttgaatcccaagcaaggaaaagcatagcctagcctagcaaggagagttgcttagtgttttttttnaaagggnnccaaanaaaaaaaagggnnaaanaanaaaaaaannanananangtanttgcnntntagttaagggccaactaactaccgagaaaagctcacccaagacaaaaagccaaatcggttagcatccgatggcaatttgtcgggctaaacatccaagcattgtacttttgctttttatgccatagctttcatgggctagcttgagcttgctaggccaagcaaaggtaattgcacaatctaaatagaccatgaatattggtgctaatgatcttggagccgagattcaggtccaattattttataagttcggtcaaggtct

SEQ ID NO: 50213 - DNA, 702 bp, Oryza sativa
tgtgtgtccatatatctgatgtgacacggcaaaaattttcacccctagatttaaacacagcctaatatagaatcaaattagatacgtttcacgtttcagtactatgaatttgaacatatcacatgctcatatcaaaatttataatattaaaatatgtctaatctgatgttaagtaattatattttacgacggaggaagaactagtagctaaataaaaagagagataacggtgtgtttagtttagaaatttagttcgaaagtttaaatttcttatttaaaaaaaaacacttgtaccaatgaatactgatgagtattttttttttctttttacaaaatgttactatagattagaatgtgtgacccgtgataatcccatgttcgattagctgaaaaagtagaacccaatctagcactctctctattttaggttagaagacgttttaattttagctaaagtcaaactgtttttttaagtttgaccaagcttttgaacaaaataataacatttttaatccaagttaaatttactatgaatatattcaattattgatttgatgaaactaattaaatattataagtgatactatgtttgtttatagatttagttaaacttaaaacaaatcaaaaactcatcctgacgcatctctgaacacaagatgacgcattgtgccaaaagacacgctcgtgtagcagcgcagcatc

SEQ ID NO: 50214 - DNA, 2554 bp, Oryza sativa
  unsure (1)..(2554): unsure at all n locations
tttgttaatattagtatattattgattaatgtgagtatataccataccatgaatgtgagtaactttttcccacgtgtgtttgagctaatgactaaccctcctttttttttctaccttctttcgaagttctccttaatgtgtcgggtaaaaaaatgttttgttttgattaaaataagaaacatttttgactagattatttttaaggagaatccactatgtgccgcttattttgtccttgtactataatatggcactgagtttgttaagttatacaatatgccatcgtattttgcttaacctctataatatacgtcaccgtccatttagacttcgttagtactgtataattttgttctaatgaccgaaatatcnccgggacagaaattccaaaatttggctgaatattctgaaatatcatattataaacaaggcagagaagatattcatctcaaactttggaagttttacaatctgatatttggaatttttcgtcccatggctatttcggtcattatgataaaattatataatactaacagatgctaagtagacaacgatggtatgttatagaagttaaacaaagtgcgatggcatattagaacttgacaaacctagtgacatattatagaataaggacaaaatcaataacacacgatggattctctatatattttaggaaaaattagaaccatgccattataattttgcaaaatctgatatatgtcatcctgacccacatgtcattgactcatgtgggtcctacatgtcattgagataccgatggcatatctcaaattttgaaaaattataatggcatggttccaaattaccctatattttatggttgtttagttcattacctatctactatcgtgcaacatttttataaaaagttaaatcttatgctataagttcatatcatacacattaaattacatacacttataatataattttcaaattatacaatgccatcttcacattttataggagaaatatgaaaaatgatttattatctatttaattatgagaaaaagtattagtccaaattaatgtatatgtagaaaaaaataatatgaaagaattacggaaatacctacaatcgtatatcatgcagtaagaaaaggagaccacaatcgaatcccttattgttgagcaaaattgatggcattaattttatctttttttagctaaatctatctgactataattaatcagcccgtgttagtagaagtctgcatcttcatgcatcaatatatcataactcataactcataagactattagtaatagccaagtacactgacccaacaatacttaatatatcacaagactatcgggtaatggacaactcatctttgattgtatatcacaggagtatcggataacagacaactcatctttaattgtgctaaagaaaaaaaagtaaattatagttcgtactatgtattcttaaatgttttcatattatgtcagcctttaaccattcttttcatttacagaacaactaactttacatttcaatttggaccaacctatttcatccatctccaagtccaatgactctataaccacacactaactctctctttctctccattttattttcccccgatagttggggaaccgctagatccagcaagaaggaagcctggatctagcgtctccactcttcatcgggtcgactcctgcctccgtgagtcgctacaatagtatgcatgacaagagggagaggaaaaaaagatggctcatggagtgcaactagagggtgcagttgcgcatgcaaagacagagaggagaaacgatggtggctcataaaaaaagagtggtggtggcggtgcgtggagtaatagttagtggttactggtagtatgaagagtttgttgtcgactcaaatcgctaactgagtttgttaatttttagaatgtggaccactagtcattataaagaaatagtcattataaaganatagctagtcttataaagtagtaaaatattgagatatcataaaggtgagagtactcgtctagagcttttaactttttaccatttttaaaatatggtaattaagaatttactactcacaatctataatacgtggatccttatgtgtatatgacacgagaatgctccttctcggtcgcgcgaggggaggggaaaaaatcggtcgctccacccttcccccatcacgtgcgcaccagcaatctctttgggcccccaccacatgtcccctgtccccacctgccacttgtccacacacacaactctattgcaacaaatcacccacatattttgaaaaccctatattaagggaatttggtttactttttgttccaccaaaaaagtttcacgtagtgtactcataatgtttcactatgtatagatctaatgttgcagtgaactaaaatattccattgcaacaaaaaaacccacatattttggaaaccccctattaagggaatttgatttattctttgttccaccgaaaaatgtttcacctagtgtacttataatgtttcactatatatggatcaaaagttgcagtgaactgaaa

SEQ ID NO: 50215 - DNA, 1021 bp, Oryza sativa
gtatttggtaaaagtacttcggagaccatggcgaagatgattgaagcactcagctttggagtaatctagttcgagagaagattatcttttcgactgtgaaggtctcaggggctactgtggagattatgggtaccccatacctacatggcatagttatccgactggctataggggataacttatatctatggaatatgtaacagatcatgacttgggtattacgtttccctgtatattatggaacggcctaaagtcctggtttgataagattgtaaagtagatttaggaaaccgataccgtattggttaaggtttctatcttgtaaccctgccccccaacctatataaggagggcagggagcccctctaggggcatgatgagacaacctgatcgtcagatcaatacatactcggcggattcaaatccccaaacaggagtagggtattacctctcattgagagggcctgaacctgtctaaatcctttgtctccacatccatccacttttaggtctcgtgcgctaccccgttttattattgccgaattcatgtttcgacagatatataggcagcatcgcatcctgagatcgcaagtggcaattcctctttggtgcgaaagaacaatggcatcgcattctgcaaaactgttcacagcacaaatggcagcctacctttctctctctatctatgtgctgtctggactgcaaaatatttttacaaagaaaaaatcagacaagaagagaacaaacgctgggcatcgcatgcagcagcggcctctcgtcgcgtaacacagggtccacgtaggctgtccaggaaagacgcgagatctatctccaaaatcggaataaagctaactcggattcttggcatttcaccctctcttttcttttcccttttttttcttccatggcaatatggcatcgccgcatcggccgtcaaatatcaatacgacgaaaggggaaagggctctcgaattcagctggagaagcaccaaacattgtgctgccggatatgccgtttccg

SEQ ID NO: 50216 - DNA, 844 bp, Oryza sativa
  unsure (1)..(844): unsure at all n locations
aaatattttcggaatttcttttagtttttcggaatttccgaaaagcacagagtaaaatgactataacttttcgctcgggagtccattttagatgatcttggactctatggaaagctcattcagaggactacccaactcaaccaaaaacaaggtctaaaaccactcaaaggataggttaaagcttgggtttctctcaaggtagcactacgataggtcactttgagcaccgagacatacacaaatacctcgacgttgcatccctcttaatagtacgacattcctaaactcaaatgtaaataggaagagaattataccaatagggatgccttctttacatctttctttcatgtcttaagggacgccaatgccgaaaccgtttcaccatatattctttaaatgattgatgcggttacttgtagcttcaaatggtctcgcacggtccatcatgacaaagccgtcactcttccgtcaccaccgatttggttcttcggtgccaagccccttgcttgcccttcaccgccgcatggtccatcgtgaccgaccatcgcttgcccttcaccgtcttgccatagtagccactttgtatcccacatcttcaatatcttcactttgtcattcttggtatcgttacgtgtaattatatcacttgagcatcaacacctttgcaatccttgggacctatttctttcattcaactcaataaaatattagtcccaatgatccggnntgtcaacctcacatgttgaccaacccatcgcatgtataaaatgatatgaataaatgatgagttttnatcaacaccacaagtgtcatatactcaaatatatgctcaatgtaangatcc

SEQ ID NO: 50217 - DNA, 669 bp, Oryza sativa
tcgcagctatgtgcattcactcgatagtttgatccagcatttcaatatctcaccagtgcttctaagctactctcatgaatgagtatgctagacgactaggcgcgtgagcatttagaaggttatggtgcacaccgtacctcttgcagagcaagaagtatcagcaagaatgggtattttcaactatgattgactaagaaaatgaccaagagagtacggtattcggtgcgccgaacttgcaccaggtaccatggacactctcaatgattctacccgagcgtcacaaaagtcgtactcaagcatcactagtgcacatttataggtgacttatgatggttgtatggtggttaaacactcacaatacacattgggagcgaaccaggaatccacgcgtggatggccaacttccatggcgaggatgttggcagcggcgctggatccgacaacaggctcggtgcccctccccgcctcacgcagatcagaggagaccgatgtcgccgttggtgaacctgaagacccagccggtggtgattcacgcgtgttcggcgtcgcctccctcagcccagcatcatgtactcattcacccaggaccgtgcctcccctcctagtcccgtgcctcgcccagcccgctgcacacggggatcaccgaacaggcgagtcgtcaaacggggg

SEQ ID NO: 50218 - DNA, 569 bp, Oryza sativa
ctgcagccccgggaaagaatgagagagggagaaaaggataatgaagaaaaaaagaaaaaaaatcaaagggtagaaacgtacttacacatgtgtttcactcttcaattcttccagatataataaaataatcacgcgggtgtccagcagctaattaccaggtttttgtggtgccctacagcggaacacgttcttgcggtgtctcctagctaattacacttttttggatgtcctgtaacaaattttgccaactaagtaaagtaccgaagatatataaagaagagtattccattaatttggaaagtattacagaagagattacaagagccgctagagccataccgaaaactcttccgaagactcgatgacttccgaacactattctattctactccacttagtactatactactaatactaaagtatgaagaggactttagcttgcttgagtgtgttgagagagtgaatgaactcctccttttatagagctggtatgacggttgtagaaacacgaaatgtcgattttgccattacaaccatcgttgagaagcaatcctggacgtccacgtgta

SEQ ID NO: 50219 - DNA, 661 bp, Oryza sativa
ttcctgcagccctggttaattaattgaaatatgatttacttggtgggttgtgggtacatgcatgatttcatttggtggtcgtgcccatgacaattaaggaccagttctcgagaatctctggaagatatactcatactaaccacaagccagatgggctctaggctgaatcttaagtataatcttttctagctgacacaccgttggcaaggtgttaacaatgaaatttggtaagcccctaagagaattatcacattaccaatagtcaaattcttgctatattcggttaaggaaattaatcgaataaaaggatgcatatccagaaatgaccgagttcaaggaggatgcggcatggcaagttatctattaattagaaatagtttgttagtttccttttatctttaggaaagtgtgtttagtgtcctataaggactttatgttttccttttatctttaggaaagtttctttcttgtcctacaaggactagtatctccccatgggtataaatatgtacacccggggtcatggtaatttatctctcgatcaatactactctcggcgcatcgccatcctctctcctgaggtttttacttatcaaccggcggaatttggcacctgacgcggggctgcatcgggtcagttcgatctccagcgaaggggtaa

SEQ ID NO: 50220 - DNA, 628 bp, Oryza sativa
ctcctcgtgtgtttctccccgtagacttgtgagtatgttatttctgagttcttggcccatcttcctctaagtctgattcacgacagcggcggattgattgatcgtctattttgctatcgattctcctccatttattctcattctatacaaaaggttagaaaacctagtgctagtggaatatttcttattctaacatgaatatgcattgtaagcataactagttctcctttattttagtaatattgacgggtgaaactgatcgctaactgtcacgcccagaaatttagcccaaatttccagactattttatgtattaaatccctatctaggaccagccagggtacacaaaacgacaattaatatatagatccaaacgtaaataaagcgtaaaatacttatagaagaggcacttagtcctcacatcgaaacaaaagcagcagcaatggaaaaaggcgatcctagcagggcttcagctccactccataggcaaaactcaactggggtctgagccttggtcctctaacttcgtcttcagctcagaagcactatagttctgaaaaatggggaaatagcaagctgagtacaaccatcgtactcagcaagccacaccaatgatgcagacgtgcaa

SEQ ID NO: 50221 - DNA, 785 bp, Oryza sativa
ctgcagccctgatgcaaaatgatgtaacctttcctaagaaaccttcccaaccatgcaaaaatgtcatatgaagggggtagtatgctagtagtggtctactactactagaactctagattctagaagggggagagggactgagggactgaggaagtgaggaattgctcactggagaggcggactggtggagagccgaagaaggagtggccggtagagcactagcgctgggctcttgggcggctgccggctgggcgcgtgctgccaccgacgcacgtcgggcaggaccgcgggagccaggaggccgccggctggtcgcgccgacgcgggacagagagagtgtggccaggcggggcgcgccggcgaggggcggagagggcgcggccgcacgggctccgacgcggcacgaaaaggcagtaggaggagcggcgctgtgagtcgcggcctcgcgggagcgccggccaccggattcacgggctcgcgggagcgccgtggcctgtcgggagtgggaggccaggagagtaagtggagaggggagataagagagttagagttttcttttgttgggccaggctttcttatgggccaagaaaaataaatacctgttcttatctgggccaaattatagggtagtcctgggcctacctagactactctttggtcccgccacttgaaagccggtggtggcggtggcgtagcacggcaacgacaggagccgcggtggctcgtggttggaggacgccggtgggcggcggagctcaagccggcgtgggaagaacgggagagcg

SEQ ID NO: 50222 - DNA, 1731 bp, Oryza sativa
  unsure (1)..(1731): unsure at all n locations
ttaattgattaaatgaactntgtgatgttaaattagatgttgagctccaaaaattcacagaaaaatcaagagagtatattagggcatagagaatattataaaatatttctggccaatgatttttaaaggaaacttttaatttcctcaataattcacttgattaaattgctttaacttttatttaattgtagaaaatgatttattaattgatttttaatcccgaacgaaaatcggagcgttacattagccaccgccgctgccaccacgggcgctgccgcggctgtctcaggccacatccgtagctgtctcagccgccgccgctgtcacccatcaccagccgcgtggtcggccaccattgtctccgcgacggcggcagggtgcagggagttaggaggtgcaatggaggtggaggaggcagaaagccatggatgaacggtgcggcgagctggtgaccctaacgtggagagcggcgcaagtggcagcactgatgatgtaagagcatttcgaagaaagggctaaacaggttcctaaaaattaatttttgggattttggttaaaactaggtctgttaatcacggttctaaattttatcccctcctataaaatcgataccaatctcatcagaatttgggaaatttgggaagcagaacgccgtcctaatcgcaggaatcacgccaattgttttactgtcggcgccaaaagttttttttccgtccgcttccttttcctcgtcgcgccgttttttttcgagaaattttttttccgcccgcttcctttcccttctcgcgcctttctcctctggcngtttctttttcgcgagaacacaagcgccaacgccgccacncngcaaggatagggtttgggggctcctagcgcangctctgtncgagcgcccgtccgtcaagggctctgccggccgtccgtccagggctccgccgnccgcctatccgggggaccgccggcctgccagccgtccgtccaggggcagcgccgccggccgcccgtccagggcaccaccacttcgccatcgaccgtccatccaggtcaccccgacgacgacgtgtgctgctactgctgattcactttgaggtattttcagagaaactcatttctacctgtgctcgtatggtttatacgcactgtacaagtgcttgtgcctgtcaccaatcgttgctgctcgctgccgttgcctggttgcttatgccgccggcgctgacagaggaacagctctgcgtgcgtctgcagcactgtgtccttcgcaaggttgtctggatcgggatattaggtagtaatgttttgctccaagtattatcgtatcgtaatattggaatactatgagattttctttttttaagtttaattaatattcatattaattacatatatattatgcaaatatagacatttatcatgagaaaccacgttggtttgatatatttaactgatttctatatatacttgagcatattcatttacattatttccaaaccatcttattttaaataatattttgtagtaacgtagggatcgtagaatcgggataccacttaagatttcgtaggatcgtgtagtaatgaatagtaggatcgagatactatgaaaattaggatactaggtgggatcggtatcgtttcggcttggtaggatcgtagtatcataagatactagaatacgaatcaggatactgacaaccggacttcgttcgatatcatatcgctgcgccttatatag

SEQ ID NO: 50223 - DNA, 1192 bp, Oryza sativa
tcctccgtgacgtggacaccgtcgcttatcgccgcctcatcacacgagccgtctgcgccattgcggccgacgatctgtccgcgccccccccgccccggtacactccgggcaactccgggcattcgcaggccagggtttgtcctgctgctctcctactctcgatcttgccttacttatgtgctgcttagggtgtgtacatttctcgtcttctattggttatctgaggctgccctttttttttgcctgcatggtgtttgactcacagctcgttcgggagatgatgaagtcgatcgttgcggatcagtctcatggaaccaagaacgtcctctgcaatggtttgcacgaggtaaagttaaaaagtgtataccatgagttgacacttcttattgcatccattatccgtcattctacctgtggtggtggcccttttcatacaaaatgggttactgggattcccgcagactgagatcccgttgaagtgctgccatgccagtatacatggtatggttgttactagtgaaagaataattttcagttaaaacactgtaaaattatcctaacttaatttgttggatatccttgtctccttggtgttggtggtgtgaggcatctctacgagcatgttcaatcttgttggtcaaaaggggtcatttctggcaatgagtgaaaaatgatgagataataaacaaagttcacacttaaactaccaattttattacctgaaccagccatttatagaatcagatcattagatgtggtagttagtaactagccagtaagcattgaaataaaccaattattccattgaaatactgataaactaccatttatttggctcaacgacaactatttggaaaaataggatgtttggattctgttggggctattaacaatgtcgtttaagatgtgctaaagttagctaatattgaataaaggtaaggacgtagggttttgtgaatacttggtcttcggtgccaatgacattggcgcctatcccccttcacataagtggcttagcttccacggggaggctaggggtacggtgccaatgtcattggcgccctcatgttggaccataacaccaatgacgttagccccacaagaaaggtccattcccggaataaatttttctggggtctatttgtaaagtaagttttcaaaaaggaccaaaaagtgaattacaggcttataa

SEQ ID NO: 50224 - DNA, 1088 bp, Oryza sativa
aaaacacagcagaattacgatgaaatgagtatatcgcaatttctggttttcatgaagttccaggaatacaaaactagtccaaagaattggcacataaatttaaatttcccggtaataccaaatatccacatggagacatttttgtttataaagtatttttatacttttgtcaattttgtcagagaaatcttcaaattgcatcgtctccataactcgtgctataagaaactagactgttacatattaaattgaaaagctgatgtgcacgagggtgtcccgatctttcgatgagaggataagtcgattggattgagtgacgttggcgatctgactacaactatccagggatgttgctccttagcaatcgttacaccaactccaaaggcagtcgtgaattgcatagtcagcctaaccacaagggtatttgttcctgcaagcactcgagaactagcaagaacaagatgaacaagcaactcaatttgcgaactaaagatgtaggattgaatcaacagaagtatcataggtggggttccgtaccgagcaaaccggcgatctaaccgatcatgggattacacggttcgctactttgatctaaacaaaacccaaattgatctatggggtcgtcctctaaccctaagacctgcccctaacggactcaacttgatacacaacccattgggcccaaataagttgacgcaacaccgttggcagaaaaaggtctagtaaacggcgattgcagcctctccagaacagatttgacatgaggccggatccatttgaaatagacttgataagttttcgatgaagtacttgcacgccaaatcggagttcgtatgaagtcgtggcgatcgtcagaagttggtgctgtcctgcagtccgaatccagcctgcgcgaatcctctcccctctggatcctctccattgttcctgagtaaaacaagagtgcacgtgtctctggggtataaagatgatgaacatggactcaagaatgaactcacctgatagttgacttgacgtgcacgagcacgggtaataggactatgaagttggacttgtggagatgtggatgtaccgaggggctgcaggaa

SEQ ID NO: 50225 - DNA, 586 bp, Oryza sativa
tcggagtcacggtttgcaagatatgaatttccgaaggttatacggattaataatccgaggaaaaggtttcctttcaatgaatattcttcgtgaggccgctctgtcagtgggattaaagaagaattagggagatgtttcaaacttacagagaggaactcgggttgtaaggggatgtagtatgaacttgtagtggataaagaggccgcaagtgggctcggcaggggatgtaatagggagatgaaatagacttttcggcagcgtcaaggtcccgaggagtcacaacacagtaggccccaccggtgggtcccacagctttttcttttcttctttttattttcttctctctcttatccttccttcctcttgtcggtatcttctcttgctctctccccctcgtttctttctctgcttctcgcttcttgtgcgcgacaaattggacattacgccactgtaaagagtgggtttcatcagtatcgttaaaatgccactcccaatgaatgccaaacatttggttttgccatattcaccattttataaagttttcatcattttccacacatggtctgaccaaaatacccttcggtcg

SEQ ID NO: 50226 - DNA, 863 bp, Oryza sativa
taagcatagctaattctccattattttagttatattgatggtcgaaatttgtcggtaacgaccgtcaacaaccccaacacccatgtgatcgttctccccctcttaccaagaacaatggggttttgtttattagagttagcaacttgatacttgcattcagcgcgcgtgttggctaaattgtctgtctgtttgtcttcggaaccccaccatattgtgatttcttcatagtgaaactttcatattcatttagtgtttgttctacttgttcttcgattgcttgcaggaagagtgacctcgttgcctggttgttgtgcaccacaagctcgcgacaacagacgttgtattggttgctaaggcgcagcgtcattagatggttgtagtcgggtcgtgaacgtcttcttcatccaagtgagttatccccgcctcccatagaaagatcgggacacaaaccctcgcgggttcacatcatcactgctagagtgcctcttccaccgccaatccgaaccaccgccactgttgtagcatctggctgctcactgtcagcaattggcatcacgctaggctgcagtgcttccacctttcgctaaaatgcgcctagcagtagcttggccacccatccacaacctcaaatcggggcccaaacctgcttctcacactccctagtgagttccgctgcaaactcaatctccagctagcgtttctcgctgcgccgcgactcctctctctcccttaactccttcaccttcccgaggttgcggccatccccgtccggaggagcaccgacgtcggccaccttcccttctcccctacccgtcgcgtgcgaacggtgagaatactctcctcgtctactcccgcgccacctc

SEQ ID NO: 50227 - DNA, 677 bp, Oryza sativa
actagatagttgatatggttaaataggcatgtggctaatatgggtgaaggttgagcttttgtagaatagtggctagggtttagttgtttaggccgatatcgaggtaggataaatattggctagggttttgggtgttcgctagtcgtcgctagagttggacagcatgacaactaggtttggtatcatttctagccgtgttgatagacaacatatcggctagaagaataggaggtgggtgcagttttagtggggtggaagtgttactccgtcaaccgtgagtagcggcggagcggctaggatcacacagagctcaagagctaactgtgcggcgtgcaatggaggtcaaggggatagtgaagctctgaccgctgtacgcatcaaggcgtggggtgccaggagcagcacttcgaccttaggtttggtttttgccgggctttacaaccaacggtttgacgttgaggtccgtagaccgcgcaaacgtccccatggaaggcgtaaagccggcggctttttagtggctaaagggtattttggaaataaaagaaaatatttggaaagcaaatataagtttaaattgtaaattcaattataagattaaatcaaatatttattcaaatggtatttgaataaattaaggaaattcacataaaatcttaaaatagcaaattgatatcaaa

SEQ ID NO: 50228 - DNA, 832 bp, Oryza sativa
gcatttgtaatcttttctatttttgtaagacgtggatctgtatgtcaacaattgtcgtttgtgtaccctggctggtcctggacagggatttaatgcacattcagcttagaaattctggttcgagaatttctgggcgtgacaagttggtatcagagccgactttgaccgtaagacaagccaactggaaaccctaagagccctctgaaccccttttttcatctgcatatgcctttttgcacctggaattgtttcgggaaaatttggagttttgcctctttggtttgcgggaaaaatcttggtcgttcattcggatcggattttttttttaaaaaaaaattattagctcagtctagggctttagaaaaattttagttggagtttattcgacagtcagtcgggaatttattgggggttatgcattaggtcgtgtctatattcgatgggggcaatgttatgcgcatcattttctatgcaactagtctatgcattaatttattgtttagttgcattagtgtctttatttgagttcatgaaaaatgttctatgcataaaaatcatcatgctcggttatttatttgagtcttcttttgctcggtttaatttggatttgagcatgaattggttcctatcccttgtctactttagatgtcggtcctatccctcgtttgcaagcgccgccccgagcttcacagtcgccgcccttatctttatcgccttcttagtctgtttgcttgctagttttcgtgtttaggtttgttgcttgagggttagtcggcggtcgatatcatgtgtcagtggtatgactggctcaattaggagttgcgtgcctctt

SEQ ID NO: 50229 - DNA, 1547 bp, Oryza sativa
taggagaatatgaatgcaaaaatggtacgttgatggtatacaatgagaggtgccgggagttgatggatggatttcggctggtaactttaaagcatgtatctcgggagcaaaatgttgaagctaatgatttgggggatgctatacaactcgttcaagagtatattatttaccgatttgggattcctcaaacaattacaaccgatcaagggtctatctttgtgtctaatgagtttgttcagtttgccgatagcatgggtatcaaaatgttgaattctgcgtcgtattatgcacaagccaatggacaagccgaggcgtctaacaagagtttgatcaagttgattaagagaaagatttctgattatcctcggcaatggcatactaggttggctgaagcattgtggtcttatcggatggcttgccacggattgatttgaggcagttttaccatgggaacagatttgcagaatgagttgtcagctaatgaatattataatctcatggccgatgagaaggaagatttggttcaatccagattgagagctcttgcaaaagctaccaaggataaggaaagggttgctcaacattataacaagaaggtggtgcctaagtctttttctgagggagagcttgtttggaagctaattttgccgataggaactcagataacaaattcggcatgtggtgtcacgcccggaatttctatccaaaattccaaacgcttacatgtgcgttaaatcctcatccaggaatcagccgaggcacacaataacaaattgataatagaatactatcaaacagctaattaatattcgcaaaataataaattattatagaggtggatagttcctctcaaaagaataaaattctacgcagcggaaataaacataagactaaacagctatggcgactccactccacaagcaacttgacccgaacaaagcctaaccctcctgatcatcaccttcactaaagtactcctcctctaatgaatgaatattgcaagaatgagcatatgacatactcaataagccacacaacaaatatgcaagtgcacaggataacaaagcatggcataatacagctcaattgcataaacaacatttaataaacatttgagagaacagtaaaacagttgagtaattaagcaatattaaatgaacactatacaacacacccgtgttgcataggcccaacctcacctgaacaaccaaccccggttgtacaaatcaaacctccataccaggaatataccattccaaaccaggagtcaatttagttatcacaaactatcaccaataatgagtagtgtgagactaatgacgaaaaacattgttaaactcacccataaccgcgggcacggctattcgaatagttttactctggccagaggtgtaccactatacccacaagacatagctccacaacatgtcaccatgcgcctcaataccaccatgatatctcggataggaactgtgacagtaccccttacacaacacaatccaccacagcgcaccgttcctggatcataatcaccccctcaataacca

SEQ ID NO: 50230 - DNA, 2214 bp, Oryza sativa
actagaggatcccccccatgtgactggccttgagcttcttcaaacgcttctgaaccttcctcaacgaaaacgctctcctccagaacgtcagaaactaaagcaaatgaacaaaatcaacaaaacagtacaaaaacaagcataaacagaacatgtggatatttttaacatgtagatctcgattttagatgaatttagcaacttgaaccactcgaatccgagttacgatgatttagttatgaatttctgaagtttaatcagattttcatcaaatacagaaaattattacgaattaaataaaagatttatgacgtcattacgacatcatcgccggccatggtgcgggatgacgcgaccaccggtggtagagggctcggccgggctatccaaggacacctacgcgtagaggacgacgacgcgaactcaccggtgcaaagaacaacgacggacgacgacgaacaacggccggcgacgaggaccgaggacggcgcggctcggctcgacggtggcgacggcgctctggcggcttgcgacggcggcgaaggggttgccggggtactcctcctccgcacgcacccgacggcggcaatgggaagcggcggcgacggctacagcggcggcgcggcgcggctggaacggcatcggcggcggcggcgactagttcaacgcggcggcggtgctatgggcaacggcgacggctaggacttcgggcaaacagaagaggatgactaggggatgctatttataggcttggattagagaaatcggactccaaacgagaggaatcgaagccggaaaatcctagggttaggtggaaagataaactcgaaatcgagtttgattcggataaaatacgaagcaattagctccaattcttggggaaaggatagaggacaacaaagggataaaaacccctcaaccaatcggactcagagatggccggttggggcggatttggcggggaacggcggcggcttgggctcggcaggccggctggaggttgaagacaaccccgacatgtgggccccacatgtcggcggctaaaaggaggggggcggtggcggctcggcttgggccggcttgggccgcacggccgcgcgcgaggaaaagaggagttgggccggaaacggcccaacggcctagggaattttaaagactttttcaattaaaataattcgtgaaatgatgtttcatttattaaaaatacttcccttgctcaaataatttccaaaaaaatctagacaatagataaccaagcaaagtatttaataaaattttatctagctcaattttatgttgaaatttttcctagattattagagtttaacttgtaagcttctaaaataatttctaaaaatgatttaaagaatgaattattaaactaggctattttcatggcgtgacaagtggtcaccaaattgggaaggcccgtttcaaatccataaggttgtgtccaaaggagcttgtatgttgcaagggtttgatggagaagtttatggacgagcacttaatgacaagtacttgaagaaatattacccaagtgtctgggtcattgcatgatcggctaagtgttgccgatgcatgttagccgatgtatttagatcgccttcagatggccgatatagttatatcgcccttagttttgttatcataatcggttgtgtcttgccgatgtatgacggccgatatggttatatcgcccttagttgtttttctgtattattataatcgatggtgttttgccgatgtatgatggccgatatttgctatatcgcccttagtacaagttataattttatcaatgccttcgtcattgcaaaattaggggggcagatatatgaaaaaaaaagtggattttcaacgcgaaaattatattaatcggcagatggattaagagttagactacaaatagccgattacaaaaatgagtttcaagctaagtcttattacaaagccaatcatttagagaggtattgcaggatagccgatataggtcattgtctaatttcctctacttcttggatgtcttgggcatcggttcctgggataaccttcacagacttggttaaatcagcaacatttttgatggccgatttaagtcatgattttttctcttcgattgcttttgggagattggctagcttctgtgtttccaaggccaatttagcattgcattcttcaagttgtgccatgagatcaatctttcggagggctgca

SEQ ID NO: 50231 - DNA, 537 bp, Oryza sativa
atgcacagcaactattgattccaaatatgtgctttacaagagatagagcatctggcctttccttttgcttaatatgtctaacagcagtaaggattaaggaacactcagacaacatactgtaatcataggcaatgctagatttcaacacatcatgggatctgatatgtgactataacatgccatgtaaagatcgctccatacataggagatgttaatccaacagtggtaatggaccaattgcataatcctctattttttttcccattgaactttgttcaaaaactgaattgatagaactacttgtaataaaatcaaatgtcctagcctacataaaaatagtaaaattttagaacagtacaatgacacggaatgttaaagaaaagaaaagaactctttgcattaattaaagctaattgaatgggactacaaaattatctaaagatgatggccaaatgtgtcctttgctaccaaaattacaggaaatcagtattgcaatctacatctagcaacaagctactgagtaacacaacagaagat

SEQ ID NO: 50232 - DNA, 680 bp, Oryza sativa
aataaatacaatacccttggaatactctcgagtgaaatgctacaatggtatatccgtgcgcttgtggatgaactctgtaaccataatataccagaagtatttctgtgccattgctgggaattatatttctagtaatgtcgttaagaaataccaacaaacatttctggcgccattgccgaggaagattcgtaatagagattacctgaactaatagcaggataaccttggttgttttcgcttttattgtgaaaacagggtagtgcatgactggtttcaacttgtcggaaaacttcaaagaaaatccaaaagctttcgtccgaagcgtcagaccgcgagtcgttgctctgcagaaaactctacgacatagaaaccagtcgtaccagcaccaccaactttcaggactatggctgacaagacccttcacgagttcgctgctccctctactgacaatgtggccattgggccgcagatcaacatgggagacgtggatttcgacttgaagtccaatctcatcacgatggcgcaggctagcccattctatggcaagcctaacgaggatgcctgttggtatttcttacgaccacagataaatccgcaagcgcacggaatactgctgtagcacttcactttcgggtgaccccaaaaggatatcgaactcagggaatgtgtgtaatctacct

SEQ ID NO: 50233 - DNA, 583 bp, Oryza sativa
ttttttaattttgcttccaatgccatgctcacatagtttgagaactaactcaaaccagtgcacatcagctgaaaccaccatccagaccgttttaggatcttgtttgtactaatgagggatacgttagacgcaattaacctcaacccttagatgagggacctgggtgaactttttcatttcggaccacgccaatggtctaccgggacgggcccaacttattcagtttcaccccagaaattagatcaaaacaagcccactacgcccatcaataaaccctagcagggtaccagtccaacacccgcacgcgtacagcacgccgccagctgctgtcgcttctcggctttcctcgcgagtcgaggctcgcgtcgcgtggtcggcccctccgccggccgttccctacttccttcgccgccagtcgcccggaaagaaggcgcatccacccttctcgctgagacatttccatcgagccacccgcaggcggcgaaggaagggattgcgcggcgcgatggagggaggcggagaggatacggcggccgccatggcgatggaggtggagatagaggcagaggccgtcctatgcatg

SEQ ID NO: 50234 - DNA, 576 bp, Oryza sativa
agtagctccagtgcttatcctgtggtatggtcggtcccatttactggtaatggatagtgctctgctgtagatctcgtcagtcagagttcctgtagatcctgtcgatcagggtcctgttgcgttcccacgagtgccgtcagcacacagtggttccaggtcttccggggtccttgaacggtcagacactgtgctggtccttattccttacggtcgaagcttcatgttggtcccatgcttctgttgcctcaggttgctaagcatacgaatggcttcttcgcggtcagctaatcataattaggcctggttggatcttggtgcagctggttctgagcgcccacttgttagtggttgtcctttatcttaagcagcaccagatttagaaaattggggaaagaatccaccgggaggaaagataaggatttgagtttgaaaaggggatgagaaactaacccacaaagattgcccaaaaggtggcagcttcatagcaaggaaaacaatacacaaataatggatcgctgtcccttattgcgagaactcgcactagtgagcggattaatacaacgtctacaacacaca

SEQ ID NO: 50235 - DNA, 1331 bp, Oryza sativa
acagacctagatattatgttaattaacaatgtggtacctctgtacagtggttcttatgtaagtcctcgcgaaggaggcaaatatatgctgagcagggcaaatgtgatatttaccgaggcgcacataaatatcttgattatcgcgcgatgtttgtgtgattttatggaaacctggttgagatgacgtggggtctctcctccagttctctctaaaaacctcgggaactccagaactcctctcgctgctgataacgttacgttcagagcgcatggggactagagttcatggaacaggtgccacaattgttaataacttaatactgggccatgactaagctaatgattattagcaagttatggactgcgggtaaagcgtacatctactgcagtatgaatatgtttaaaactattcgaatagccgtgctcacggatttgagcatcgggactgatatggtactttggttagaaatataattcaagattttcttaaatactgctgcatatcaagcatttcaggatttctacctctttattctcagcattctgcaagtaaatctagctctacacagatattacctctcatgcattcattgttgaataatataatagcttgctgagtacgttgtactcaaccttgcttcaacccctctttttcagagtctatttggagtttttgccgaagctgggagttcaatcatataagttagtttcattctaacttaattttcaagtatagactagatacatgggttaagtctatagcaaaaacattagagttcagccattctatagcttctgctgtaatagttagccacaaacttgtaaatatcctattattttatataaagatatctcctttggagtctttaccaaatgtatgcgatgaagatccagattgttgaacctgtatcaatctactgatccaaggcttgatacaattaaacatctcggtttctgaatcgttagttttgggatctgacagcggcggaggtgcggccgaggaccggcgggacctagggagtacagaggagggattaagagagggagaggcttcgcggcacggcgaggaacaccggccgagcacggcgtttgcggcgggactcaccgaggagtgaggggaggcgattacggtagctcccggaggtgaggaggtggtggctcgagggtctcttcattcttgcggagccgaaggaggcgacggtgcaccgcgaggaggtcgggaacggcggggatcagcgaccggaggtggcaaacggcggcggtctcgggttgatggcgaaagtggtgcttcggaggtggactgggcaaactaagtggcagccggtcttgcgc

SEQ ID NO: 50236 - DNA, 553 bp, Oryza sativa
ttcccctataatttcacttgattaaattgctttaattttaatttaatttctagaaggtgcattatttaatgatttttaatcccgaacgaaaatcagggcgttacaataggcgttcctaaaaaattatcacacttcatagcatattggagagatgagaacttttggttcaaatcggaacttccagtataggattgaagttccggtctcaagcaaaaagttcggccccggataacgaaataaaacactagctatgaactcgtagctcgaataaacaaaatgtatatgaatcaaatggtgacaaataaggtatctaagcaagatataaggtcaccaactatattaattaagcatgcaagtagatcaggtaaaaacaagatcaagatatgagagatggctagaacgagcaaaccaagagaggagacacgttgatttgtttcccgaagttcggatccaaggatcctacgtctccgttgagggaccataaggccgggtctatttcaacactttcttcacgaggttgcacaaatgcaatcatcggtttcagggctgcagg

SEQ ID NO: 50237 - DNA, 1408 bp, Oryza sativa
  unsure (1)..(1408): unsure at all n locations
ccagaagctatcaaattattatcagtttagcatctttttcaatgatgagaggtgtgagactaatcacgaaagacattgttagacccgcccataaccgcgggcacggctattcgaatagttttactctgatcagaaggtgtaccactgtaccacaaagacacaaccccacatcatgtcaccatgtgcctcaataccaccacggtatctcgaaaaggagttgtgacaatacccctcgcataacacaatccactgcagcgcaccttcctggatcataatcacccccttataaacaaggcatggactccccagcgacccccgtgggcttatctccgccacttctcagtctggtgccccgcaatgaaccatgctatacaaaagataaagccgttgcccatgctggcttgtggttggcacgataaatgtttcacaaccgaaactcgtgacccggtccttaattgccatgagcacgaccatcaaaaccatgtgcccacaacccaccattaccaggttttagttggcacattaattaattaactaatcacgattgaccatcgtgaactatcaataagccatcatgaaataatagtgagtcataagatacnccatttatacgagctagtgtctctaagcatggctaagcattctagcactttagctaaaaccatataatgttctagctaatccaattattaaccaagtgacaaagaataggtaatcaataatcaaaaggatataacaaaggcaataggttaattccacccaatgacattcgaaaataaatgcaatagttgaaaagaaacaatagctttaaataggatcaacatgctcaaagggttgtttgggatctgtgtgacttgccttgctggccttgaactcttcaaactcttcttccgcgaaaacggactctccggaaacgacggaatctaagcaaaaagaagcaaaatcaccaaaacagcacataaacaagcatgaacagtacatgtggatatttttaatgtgtagatctcaattttagaaaaatttagagacttgaaccaactaaatcggagctaagatgaattagttatgaatttttaaagattaaatcggattaaaacacttatatcggtttaaattgaattatgacgcactaatgaattatttttgaaaaggaaaaggggatttattgcgtcagcgggctagggtttggtggaccgggcgcacgggcgggcggttcacgcgaacggacggccgagatttaaccgatccaagatggacggccgagatcgatcggtccacggcggctcacggcggacgaccccgatgacgtcagcggtgacgtcaccgacagcggcggcaggctcggcggagaagacggctcgaacggcgcacgctcgccggcgaacggcggcactaggacgcaaacgga

SEQ ID NO: 50238 - DNA, 890 bp, Oryza sativa
gatgactttatttcctatgggttataatttgattagcatgaaccttatatattggattggttcggctaaatgctatatgtaagtttgcttagccatgcttagaaacattagctaacaaaaggagttaaatataaattatattacataattgttattattaattagggttatattcaatggtagctcacgatggtaaatcgtgtgatgttaattaattgataattaaaacctggataaggtgggttgtgagcatatggttttgatggttgtgctcatgacaattaaggaccggttcgcgagctactgttgtgaaacatttatcgtgccaaccacaagccagcgtgggcaacggctttatcttttctatagcgtgattcattatagtgcgcccgactgagaagtggcgagaagtccatgggggtcgctggggagtccatgccttgttttaaagggggtgattatgatccaggaaaggagcactgtaatgggttatgttgtgcgaggggtattgtcacgactcctttccgaggtaccgtggtggtactgaggcacatggtgacatgatgtggggttgtgtcttgtgggtacagtggtacacctctgatcagagtttaatctattcgaatagccgtacccgcggttatgggtgagttgagcaatatttttcgtgattagtctcacactacccattaatggtaataatgtggtaattaatttgatgcctagtttggaatggataattcctggtttggaggtttaatttgttcaactggggttggttgttcaaatgtggttgggcctatgcaacacgggtgtgttgtatggtgtttatttaatattggttaattatacaactgttttactattctcttaaatatttatgggctgca

SEQ ID NO: 50239 - DNA, 687 bp, Oryza sativa
tcccctcttccttttgtcttttggaatctctcgctaatttcgtttggaaatcgtcggattcgagctcgattcggattcaattttctccctctaaccctaatctttccttctcgccgccggccgccgtgggcctctgtcacatcctgatttttgtttcaggatttataaattatttaataaactaataatagaatttatattaaatgatctttaatttacaagtgaagttaaatgtgggaaataaaatttcctaaatataaagcatgaatggatttaatttttttattaaattctccatggttaattacactctctgaaatattctcggatctttcggagctcaattcctaaatgatacaaagaacagttcagtaattatttgataaataatgatctaattataattgttaagagtttttcttgtttaaaaatccttaaattataaattgttgtttaaaaggaattattagaaatgattttaaaagtctaaaagagaagatctaattttaatttgctaaatctcaatataaaattgggctagataaaattttgttaaatactttgcttaattctataattcctagatttttctgggatttatttgagctaaggaagtatttttaataaatggaattgcatttcatgaataatttaaatagaaaaatgtttttaaatcctccttttggg

SEQ ID NO: 50240 - DNA, 590 bp, Oryza sativa
cggattgaggagaaggattttaatttgtttttccgttgaaataatcactgaaatgaactttatactattaaaattaaattcttagctctcaaaccaaagagtattttagggaatgttgagaaaaacttcaggcatgatttattaaagaaaatttaatttcccatctttaattaacttcttaattgatattaattttattataaatttcaaaaatatttcatgaagtaatttaaattacggaaaaaaatcagagcgtgacagcaggaggagaaagaaacctagttttcaaggccgcaatgaagagcaagtaccatctagaaaaattcaaagagtaagtaaatgactgttaggttgtactcctaccatgcatcagttaacgttgtcattgcaagcacatttctactccatacaacatacagggttgaagggtgttacactgtcaaaagtgtccattcgcaaattctgtcaaaaggttatcaatgaaaagataagatatagattctacctcaattctggtagaatggtttcaaacttcttaacaatatattttttgtgaaaactttctatatataagttgtttaaaatatcaa

SEQ ID NO: 50241 - DNA, 654 bp, Oryza sativa
tatcacctaatgttgacaaaggacgggtaacaagtaaacatggcaaaagcgagcaaataggttatacctgatcccatgtaattagcaaaacatgcatatttatttgcaaacagtaaaatatttataaattaggctcaatatgcttaaggggaatgtgtgacattccttgcttcttcacttggatcttctgaactctttccctcgcgaccgcgaacttccggaacgacggagtctacacgctggcacgcaaaatgaggaaaaactctaataaaaaccaagtaaatagtacataaaaagtaaacaaacatgtagagctcaattttagatgaattttacaagttgaatggaccaatatggagttcgtatgaattagatatgaattttagaagttttgagccatttaaatcaatttctagaattaaatacgatttattgcacaattattaattaatttctcataagaaaagggctgtcgctgacatcattaaggggagaggcgcgccaacaggcgggccccgcatgtcagtggcataaggggaggcacacggtggactcggttcaccgcggcgggggcggcaccgtggacctggaccataggaccgacggcctagattggcctgaagccgatccaacgggcacgggcggcgcgacagg

SEQ ID NO: 50242 - DNA, 820 bp, Oryza sativa
ccgtcctccaaaaccaccgagaaagtcaaattacactcattttgatagttgagaggtcaatatatctggtcggtttaagaatacgaatcagattcgatgagtagttaagggagttaaagtgaacttattaaaaaaaaatctcggatgtttggttcaggggagggctgcctcctgcctgcattgggtttggctctaactagtgggccgttttagttatatagggctacaacttttggcccacttgtccaaccaagcccactaaaaattctgagttggcctactatgggctacgaccaggtcaagcaccctgtcactcacacaaaaagtcaattgtcaccagatgattgatgaaaaagtagagtaacgacatcctgtcgaccaggttgatacaagtgttccattgaaaagtcaacccgtcgatccagttgtcctgggacgaattgatggaatttaggccgccagcaagcaaagaccgagctgagcagctccagccgggtgttatcagggtcaaaacaatccaaatattttcaaaaatttcagttcgtttgacttggtttctggccgcgacgtctgctttctctcgcgtagcaagtggtcaacagaacagtaggttcctcgtttgactatcctatgtaatccaatattccctccaatgcattgctacactcattcggtcattcactatactttgtgtacggatttttatgtgaccagttgttccatcacggcaagggtacatgccagccgaacaccttagctaagtttggaatatcgtggcacactcccgcccatgcaaacctagtacaaataaagccccaac

SEQ ID NO: 50243 - DNA, 580 bp, Oryza sativa
gctttgcactgattttgatagttgagggacccgttgtatttgattttctggttgaaggatgaaaattggattcgttgacaagttaaagggacctcaagtgaacttattccttctcgctcttcaaggactcggagccgcggggttggtccattcgcagagctcagcggtggaattagctcgaagctcgatcatggccgccgccgccgggcttgccgcgccgcctcctacctcccggatttcctccttccccagggctttctccaccggtatggcatccgccccctctcccgtctcgccattttatcccttcctgtatctcgtgtagttgccgagttgggtagttgtggtatggcctatggggaattggggatcaaaggttctgcgcgttggaacggggtgactcggctgtttctgctctaagtatcgggtttcggaaggaagcatgctgtcaaatctgaatttctgtgatgagtttgctgcattgcttgtgtgcgcgtcaagatttgtgcagttcgtttggaggagacttttgtgtgcaaatcagaacaaaaagtaaagctattatttggaggattctggt

SEQ ID NO: 50244 - DNA, 1222 bp, Oryza sativa
aataatcaagaaaacaacctgcaaaggaaaataaaccgttttcccataaaaaacaacatcattatttgagagccaaaattgctcggcacgttgttatcgtctctagtaaaaaaactggtctaaactttttgttatgtcgcaaaatccattacccaaagatattggacgcgtttatggatgatcaaatacgactacgagtatactccctccgattctatattaattgacgttttagacacggttgaggtcaaacttttataactttgatcatcgataactttaaaaatatttagtttaaaggaactagaacaacatgtatagatttgtctttcaaagcactataataaaagtaaacatgtatttatttattatttatattataatagaaaaataaggttaaagatatattttgtagaccgtgtcattgtctaaaatattaattaaaatgatacctccggagggagtaggagcgtactaggtgctactgcgtttgactttgactgggagcgcagcgttagggtgcatcaccatcaagttcgtctctctcactctctgcttctcactactcgtaaacagagagtaggcaagcatggaagcagctagcacatgggagtgtaggcggtactgcgcttgaacttgtctctaggcgatgggcggtgggagaacccgggaccgttagctgtgtgtgcatcactgcatatttgcatgcagtgcgtgacgaattatacttgtgaattttaagtttgtaaatttttcagttgtaaaatacaccgtttaccatttttcttagttaggaatgaagcccgcgtatttacaagacaatatgcatcgtaggttacttttgagatacttattgtttttaataaaaatgccttcgagtggtcaaagcgtaaactacctaattgtaaaaacaattaattggaagtgcggtctagcgggccatgcaaaggcaggcaggttcgatgaggcttccggccttccttatctctcggcaaggtcttctcacctggctgaggtcctagctaaagcatgccgtttgtggcaaaacgcaaaagcgagtaaaagaatgacgtgtgggtcgtctggtcttcttttcaacgttataatgggtgtattcactttgacattatttttaaccataccattttctttaaaattgtcaaaaaaaaatgtctacgtttagtttgttactaaatttggttaagaaatcatactaaaattt

SEQ ID NO: 50245 - DNA, 2222 bp, Oryza sativa
gttagatttgttagtccgtgtactaggcgagaaaaatctttcgtttttcgtgcaaatgtttttgggactgttatcagaaaataataaaagaataaagaaaaatgatacgtttatcggaaaaaaaaaagacaaacggacaaggatacgttaatcgaatgaaaataagaaaaaagaaagacggacaataattgtttttgcaaacataagatagcaataagaaacatgcacatgcatgggcatcatagcgtaggtaacgaactacagttcttgatccgatgaaaataagaaggaaaataaacaaacggacaaggattgtttttggactcggtattactgcatatccttgactgctggatcgacaggaaacggccaagaccaagctgggagatcagcatgcgagcaaagctgcaggctcgacgtggcttccgggcttgcctatctcggcaaggtcttcttctcggggcctccggcttggacgaggaatatttgccgtttgcggccagccggcgaaagcgaactgagattaatggctggcgagtagtgactggcgtcatgtttcttgacgagctctggtcaccgtgagcttttgacatcattaatgctatgaagattttgctatgtactccttctgtctcacataggctgtgtttagtttctgaaattagggagaagtttggagaaaattggtagtttggaaaaaaaaattagaacgtttatatgtgtaggaaagttttagatgtgatgtgatgtgatgtgatggaaagttaggagttgggggaagtttggtgtgaactaaatagggcataaactcaatgtagtattggatttgatgtcttctagtacaacaaatctggacagtagaaaacgttctatctaatactaggttgagttttttttgaaacagagggagtagatgtgatggataattggagaaaatattctctcaacataagctggtaatatattgatgtacctaaaagtttaggttaacgactacaaattacaggtgggtttatttctgaatttctttcagtttacttgtgctaattactaactgcttatacatacattcctcgcaaaagatactcaatctataacttgtttttctttttttttttcagaggtagttacttggcttggttgcatcgtgccaacggtaagagtaactgagtacgctccccacgcccaatgcacctatactgcctccgttaaaagaaaaaatccaatacgagatgttatgtttaaattcatagtatcaacacatttcgcgctagttttttttttccctgacagagaaagatacccttgtacacgccctaataagccagcgtaatgggttaggagacatcatggcatcatgcatttgtacactactttctgttatttgtaatgtttattccgaattttttttctattttacttgtacactactttctgttatttacgaagagaccacagctgtataaaacggcttgactacactccaagaccatactaatcagccctcacatggacagtaccgtttcatttttttttctttgacccgattgcattagattaacaaacaagcacggagctataagctactaaaacacaatgcaaaattgcaaatatcacagcgcactaacgataaatcattcaaatggtggaaaaaatcaaacaaaatggttagattaatatagggctgcatgtgaatgccacaagaccagttttaccaaaccattgtaggctttataaactgtagttttctacattaccttggctatgagttgtctgttactagcaaatcaagagtacgctggggatgtatcccccacccgtctttttatttcattaaaaactcatcgggtatgtgttatggcagatgccacgaatgtaaaacattttcattgtctaaacaaagaagattccatgaaaccatgcaaacatgaaatacagaatgacccacatcagagcttacaaacgttggcatgggcagttcaaccacattaggttcaatatcaatggcctcgcaaaggccaacttttggattgacaggaaacggtatagtaactgaaacccattagtctcatactctcatgtcataaatccttttccactacagcagaaatgcaactaccatgagagaatcctaatcctattcataaattcagaatagacgacaacctggctaaaagtaaaattctgaatcaggtggtaagcttcttgacaattcacaggga

SEQ ID NO: 50246 - DNA, 726 bp, Oryza sativa
actcattctggtcaatcttttccccccttcagtaaagaagctttggagaagatgtcttaggtggagtcctggcttataccccagttgagcgcctgtgaagatggagccgtaggcccgctagtccgctgctgtttatttttgattgtcaggccttaagtgcctttgtaataatgtaaatattatcgatgtaataaagatgtgtcttttatatcatgtttgtatggtgtaccccggcttttcctgggacggggattaatacactagcgttcgggaaaaggcaattttcccggtcgcgtcaagctggtatcagagccatctcgactgtaggataagccaagtggataaaacctaaggacatattttataaataaaactatttgcgaaagttcctcttttttctccttcccctaatgctatttgcaaagggtttacccttttcttccttcttcaaatttcaactagtactagatggtcagctttgcgaagaagaagatgtcgtcagttgtttgccgaagctccggaagactgcaggatccgctagcgaagcgaaggaagcagtgaagccagctgtgaagcaggagtgaagatcttggagaacccgtcgcagaacctaagccaccctctagtgtttcgtttgtcgtgtgtttccttgcttgtgtgtgtagcgcgtggtttgcatcagtggggtgtgatgtaaccatgctaggttgtttgcttaatcaactt

SEQ ID NO: 50247 - DNA, 725 bp, Oryza sativa
ggatgcttctggtgacgatgaggtccctttggcttgctgcctttccgtgaaaccttgaagtgtttcgccaaaagctatactaactgtcgttgcctttgatccgaaaaggacgcatctgtaactcttagtccaaacaaatgtctctttggttaatcacttgatttttcttttccatcctcaggttggttattagctcgaggttagaatatagttcctctggcacgagaccctaggtctcctttgtcagtaaacaattatacacatgatcacatatccgcatcttccaaaagaatcctcttagaacttgtttttattaccaatttctcccatattacatgaatacaaggcactgtcttaaacaaaaagggaaggtgcttaacatcggtacattgtttctactatgggttagaattaacatgaggcctcacaggtacggcgtttgctccagtgaccacaaggcgagtgacttgtcttcttcttgcataatggccggagtgatgacgcaggttacgcttcggctgtggacaatctctggagaaatgacctggttctttgctctgataccagcttgtcgcgaccgggaaaattgccttttcccgaacgctagtgtattaatccccgtcccaggaaaagccggggtacaccacacaaacatgatataaaagacacatctttattatatcgataatattcacattattacaaaggcgctttaggcctgacaa

SEQ ID NO: 50248 - DNA, 709 bp, Oryza sativa
tatatagttagtcggagttctccttgggggtgtttgtatactagtaagatttgggtctcccataatccattggtaatatgaatcagggtggcctccttttgccatgtattcatggatcttactctttttaattttggttgaagtacaacaaggagtacatttttgctattatatgtttaggacaaaaccgggagaacttgggtaaaagtgccccttcggctgctctgatcaataaatttatctgcaattttctatcgatgactacttttttaagtttttcagatattttgttatgtgtgtatattgcaagtcatgttatgtcagtgatgagaagatatttctagcgttttatttaaatccacgcttgtgatgtatgtgagttaccatgtttattgtaactgctatcactgaagatttttgtttccttttgtttttggcttgtgcagggatggctgatggcttactaaagattaaagagcataaaaagtgctagaaatcaggtatctgttacattgtagctaatcaactagtagcattatttacattgtggtcaactaaatttgtatgcagaaggcatttgatccatcaacttttgcgttgttatccccacgactggtgattaatttttagtttcgcccatattcagttaaattggatgctctctatatttaaactgaaacttttttttatgtatccaggtattttcatt

SEQ ID NO: 50249 - DNA, 1315 bp, Oryza sativa
tttttgattgtcaggccttaagtgcctttgtaataatgtaaatattatcgatgtaataaagatgtgtcttttatatcatgtttgtatggtgtaccccggcttttcctgggacggggattaatacactagcgttcgggaaaaggcaattttcccggtcgcgtcagccgccttcccctcctctcctcctgggccggccacccggcccaaccctagccgcgcccccgcccgtgcagcgcgcgtgcgcgcgctgacgccgccgcctgaccggtgggtcccacgcgccaggccgggcgtcgtccccttcctcccgcccggccgtcctctctccctctcccgtgaaccctagctcgcttcctcctctaaatccgctcgattcaagcatgggattcccaaattgattagggggaattaatcccctttccctcctctctctttcccccttaattcccccttgaatggcgcccccaatcgccgggaacggacgcgccaagtccggccgccttcctttgccgccggccgccattcccgtcgtcgttccgtgtcgcgaccgggaaaattgccttttcccgaacgctagtgtattaatccccgtcccaggaaaagccggggtacaccacacaaacatgatataaaagacacatctttattatatcgataatatttacattattacaaaggcacttaaggcctgacaatcaaaaataaacagcagcggactagcgggcctacggctccatcttcacaggcgctcaactggggtataagccaggactccacctaagacatcttctccaaagcttctcttactgaagaggggaaggattgagcaagaatgagtacaaccacagtactcagcaagccacaccggagatgcacaattaatgcaagggagtacaaggggataataacatagaggttaagttttgcagtaaacggcatttaaaagtcacttagttgcccaaagctattttgtaaagacgatcctagagctatacaatattattaatcaaggccgtgaaccctcacgaacctgccttaacccaaggcctacgatgatttggaccgaactggcaacccgacctgggtcccagctcgtcccaagccaacccaggccaaccattccatattttagttgttgagcaaattttaagaattaaaacactgacttgggtacattgctaggcttgcccatatccgagggctcggctattcgaatagatttactctgatcagaggtgtacatctttacccacaagacacgtcttcctcacgtgttgccacgtgccacataccaccacggtatacggacggaaga

SEQ ID NO: 50250 - DNA, 1158 bp, Oryza sativa
catatactaatagtataataaacaactattgtataaattagctattaaattggctatagataaattagagccagtagttggctataccattaaccttgctctaagagcacccgcaatagtaaagtaaggtgctatctataaaacatgtacatctcagcaatagactagattaatagtaaaccatctcaatagtatgtctacatgggtatctatagctctctaatacattgcctcgtttttctctatagactatctccaggttagtagatagctttgctctctctcttcatttaatctcttccaagtaggaaaatatgctgacatggatctcttatagagagcctatagataaccattgtgggtgccctaatactacatgcataatactacatgcagtcatgatgacctgtgaggctgtgactgttgggaggagaatgaaaattgatgtcaccggcaatccggcagtcctgcagacgggcagaaaaaatgtgtctgcaatgtgcagactctacttggtgcatactgtatgcagtacgtaaatttcatccaaatgccaaatctgccaccaaacgccttggcctcatatgccattcaacatttcatccagatgtactatacactacggtgccgttcttacaagtttgtataacttgaattccatagtccagactgcaacaatccgaaatccatgaaaagtataataacttaaagggtgaattaacttaaattctaaattagtactacagttcatggaacagatacttcctataacttgggaagttctctgccgaaaatcagttgttctgctcagggtacccttttgactgctccagggaatcagttgtgttccatgtctcttagttgacgtaattttgtacaattgcttccgcacaccagtcgtgcactcgtgcttccaatgttatgcctggcgacaaactgccagtgacacttccacagttcaactgatgctacacgttggagcagatttcttcgtaggtattacctccttcctgaaaatataagggatttttgcattgcgaaatcccttatattttgagatgaaggtagtaacatgcttttcgtcttccacgagtttatatagcctaactgccagagtgtctcacgatataaacgtccttccatttgttgttattggta

SEQ ID NO: 50251 - DNA, 853 bp, Oryza sativa
tagaactgcagaagcaagttcagatgaactaacaatgtccctggagcattgtttttttgtgaaaatgtatatatagcagtgtagtaaatgtgtccgaggaggaaatgggggacaaaattgctcagagttccaactgagaatgtatcaacagttgtgagattagatagcaatatatcgtactgtatcaaatcatcaagtgcacacaaagaagaaaaccatgttcaagagaaaatgagaagtatatggctaatagtttaatcgttacaggaacaaagaacactgacctcctttctccatagtccatagaagttcgggaaaaggttgcatcatatagcttgtcagcttatagtgatgacctgctgagaaatcacagtcaaaaaagaactacagatcaacagctcgatggatcagaaacaaattgcatgacaaaacaagataacatcgatcagcaacctaccttaagacaattacgaacctgtgatcgaagactggagccccgatgagatggttttgctggtagtgagagagtgaagctgcaacatgatctgatcgatgaaattaaagacatggatgccttcaaaccgatcaaatccatacatagctcagaacaacgaatgcagatcgagatcagaactgcagtagcagctcctggctgaattcaatatattcagcagtgcaactcatggaccagatcatgctggcagcttcagcctctcacaccagcaagaactaatatcttctgaccaaagaaaaatgcgtgctcaaacgatacttctggcattgtgtcaatccatccatctatatgtatatcatcagtggcaatttcggtagggcagtgagacaaaatcttgcg

SEQ ID NO: 50252 - DNA, 1226 bp, Oryza sativa
tgaaatttgtgattattaacattaggagaaaaaatgatgtaatttagctttcacactataaattcatgagttatagccttgtggcaaaatttgtgagtattaaccttttggaataaacacatgaattttttttcctcggtccaaaatttcactagtactagcacaaggaacatatggatgacaattttgatgaaatttagcccctcgcactataaattcgtgagttgtaggcttctcgagtattaaccttaggaaaaatgcacaatttttttcctccggcccaaaattttgctattattagcatcaagaatgttgcgttgaaatttgtgattattaacattaggacaaaaaattcatgaaatttagcctacatgctataaatttgagagttagccttctagtaaaacctataagtattaacctttaaaaaaaagtataaaatattttctttgatccaaaattttgctagcttagctccaagaccgtggagtgtggaatttgtggatatcaaaatcatgacaaaatttcatgaaatttagctccacgcacttttaacattttgggcctcagtaggccctttcaatcttttgggtcttaatgaacccttttaacaatttcagccttgactggactgctttgtttttttgctttgatagaccatccgtgcttaacctttttagggtttgatgggcctatcgttttattttggggaaaatccaaataccccctacaaatcttttattttcactctcccctctacaactcgattaggtaaaaaaaaaatcgcccacaactcaaattctcttctaacttcccccttctgtctaatttccactaatttctccaatcgttcatcaacatgttggtatgataccatagcggaaggatgcagttaggggtgaaaacggagtggatttggacggatagtgctcataccatatcttaaaccatatttttaagcagattccgagcggatgcggagcggattgtttcgggcgtcgaaaatggtgtggagtcaatgcggaattggttcggaaacagattaaatttatcggatgttacgtgtatagcaatgaatgcaacatcgataaatccaaggaataataatacaatatagtcaataaataacccatcgtaataattatacgattaattgctaaacaacataaatacatgatgttcataatataaaaaatatagctacatgagtgtgacatgcaacgata

SEQ ID NO: 50253 - DNA, 1105 bp, Oryza sativa
tgtttaacgcgccgttttgcattttagcaagcatctgagcccagaatctgggattttacgggcgagttaggccgtacaatctaagattgacgtactgttcgcttaatcattttgtaacttgaatccttgatagctcgcctgtttataccatttcgtagttttcaagcaatatgctatgcggctgcgcctcaatcacgattggcgattcgtttgttcactactgctggaaaggagctacaccaacccatcccacgtacgcaatgcaacatggctccttaccagcagctctccacaaatcacaagctcaacaacatgacagtgcgaactttgctaccattcacccatataacaaaacaatgggagacgttaagttcgaatatacacgccgttatagcacacagcagaagtgttcgggagatatgaaattggtaaaatactgcagaacatatatatccgggcgatatgaagttggcaaaatacggcagaacatatatattgatttatgccatcggttataccaagtggaagcataatctggaagtcccacgcccattaaaaatataacccttaaaaataacgactacactaattacctcggtacagcaaatttgatgaaagcatctataattctgtttgagaacagtattccagacatcaccaagtaaatggatgaatatatgctgtagatccaaaaaaattgcagtacaacagtaacgttttcacatatgttgggtctcacaaatatctattatgttggatagggaatgaacaaattcatcaaaacttcaaaaaaattattgatgtcagcgtcactagttaacttgacaaatccagtgcaataaatgaccagaaacaagtatgttcaagagtcaaaacaaaaacatgaacaactcccaaaataaacaaacacaggatgtgacgcatcctagtaatactaatttgaactgacgtcacatcttatactagatttgtttttttgggacagagggagtacattataacaaacaattcagttacaagagaagcaaagtaaggcattacgtcaaaaatatgacaacagataattgccacacgatacatacaaggatttacaggtgcatgaaag

SEQ ID NO: 50254 - DNA, 555 bp, Oryza sativa
tacatcgtcgaagcctcttccaccaagatgtctgactgaaaggtatagtttttcaagccctctactccgtaattgaaccgaaatagattggagatctatccgaactcatattggtttctcttagaggagacaggcttttgcttttaatctaatttctcaagtttgttgcattgatccatctagtttgttattgatgctgttaagattcatatgaacttggattggtttatctttttttatggatttttccttttctccatgttatttttaccctggcaatcgctaatctttaagcttgtttccaatggtgttgagatctatccaaaatagtattgatttcttgttttgacggttgacttttcgcttacttcctactactttcttattgagttggttcctatagatctataatcttgggtttggtgtgtacgctataaagatccccacaaacttggattagtttatctattgataacaagcatttcactttctcacatctatttacaacacgggtggtccaatctatctagattgttgtgtgtgctatagagaccc

SEQ ID NO: 50255 - DNA, 718 bp, Oryza sativa
gcatgcttaggctgtgtttgagatgacatctatgatgagattatggtccacatgcaaaacgagacgagtgattagggtatggttaattaggtattaattatccatagttttaaaaaaatataccaaagcagaagagagatagtgacctctgacaataatctatcagcatcaggagtccaataacatgttctgcttgtttgccatttttttctacctgtcttaaactagtgcacaattaaaagcctgctttggtgctcaaatagtcgtgcaggacaccatactaactacaaactgcaccgtatagaagcatgacgcctggtgccgtttgttgcccgggagcaaatgccattggctagcagaggaacagcaccgaagtccattgcggcaaagactgggagcccgggcagctgcccatgctggctgggccctgaatccgccgctgcttcaatatatcatgaaactagctcatcgaattgtattttcaccagttcagagttgcttacttgcttcgattatcttgtgtccaacttggatgagtcactgtctgctgatcaggtccatttttaaaattatggcactagagatggttgtgttctgaacaaaaattcaatcaaaatcagtcgcagtctactctagtgggctttgtcctttgaatcagatggacattcttttaattcaaaaactagatgaatatcataaaaattgccgggctgcagga

SEQ ID NO: 50256 - DNA, 1881 bp, Oryza sativa
cccacgtgttctatacttctgtgccctaagaggcatcgtactccaccaggcaccagcctccatgacgagcagataaggcaccagccattgcggtgaggaagaaggtgactgcaagccaactagggttctaggatgagcttacccctatcttcttttcctttttctactgtttttttctctaaggccttcttctttcccttacatatatgaaaagtcaaataaaaagacaagacaactgggagaaaacaatactgtgtaaagggacgctacattgattcacaagaaccaatttcatttggaaggaaggaaaacagaaccaacttaaagaaacatagcaagataggacattcccttttctttctctctctctcttttttttttttggggggggggggcagaaagaagtagagaaaggattacagcacttgttcagctgctaaaacacaacctagaggtaaaagaagatagctatgctccgattgcacaaaactttgaagggaccaccaccacagacaatacagctctagagataggccagagatatttctggtaaggacactgaaaaattaaatatggacaaaaaaaagtacattttcagagccatctattagtaacatcatacaagaaactcttacacatattagtagtacgtatgcaagtgggatggatgacccacctactcaatctctgcacatggcctatagctatcgtacggcatctttatgaacaaagccagatattagggtaaagcaactgaatgatcagtgtgtgggttggctgaccaagcccagttacatacttgcatcctaacagaaaccccattaatcttatccaataaattccaaacaaaccggatgatgccgacaatactgagtagcaaataaaaggccaaagggcagatgctaccaattgtacaaatacagcccaatttacttatctaaagtatgtttaatcccacaaggaacaaaacaatgaaacccatatccctcacaaacaacacagtcaacagacaacattgttgataagaaacccaacgaatctaagagaatacaaggaaacccaacctaaaccaaatagaaaacaatccatctctaaaacatccagattggaaaaaagaaaaaaaaagaaatacatcactactgctttactttaagcattttctaatttttatcacctaacctaaacaagcaagccctacaatcaacggcatgaatgggaaacaacaggtccggttagatttcatgggaacatacatttataaggcctttactttaccctaatccctaaaatcagtgcaaggcaacgatatctgatgtaaattaggttccgagatcaacttggtctgggcgtttgtgcaaggggaccatgcaactgacgggagatatcgccgtcatcgccatggatgcgggagccagtggtcgggtcgtgccgtgcaacggacgccccccgttcaccgaacaaacgctaaccctaggtaccccaaccccgtggattacctgctcgaggcgtcgccgcggagggggagacgaacgaaccgcacgacatgacggtaatcgcaggttgtaatcgtcgatgccgccatcggcggcgggtggtgggaagggggacggtcatggcggctcgtggtcgtctagggttttcgatggcgaggcggatctagaagggagggggcgatgccgtcggtgcgagaggaggccggaggggaggaggaagaccaaaccctaggaaggaaatcgccgccgaatccgcctcgccgcgccgcgccggccgccggcgagaaggggggagagagagagaggcggatcgatttggggattttttccgagagggatgattcgggaaaggattaatgggcttcgttgtgggtgggttagccttgta

SEQ ID NO: 50257 - DNA, 788 bp, Oryza sativa
cctttttttgttactttctagaccttttcagaggataaaaatttgccatcgacaatttcgtgactcaaacattttggttcacaggggacttgtgacctgagcaattttttctgacaagcgacaactgaaactaactaataaattatgctaggttacgaatgtagcgatggaccagatataacacaagtggcccaacctgaccaagccccacaaggatttggcctgctaggtatgctcaaaattatgtcagtcaaggcccaaaaaatatcattaaactgggctagtgaatatgtcaaggcccaaaaaatatcattaaactgggctagtgaatgtgtcaaggcccttgtactcttcagcctagcttaagttatcagcctgtcttcaaggaaaattagtccagctggaggttgcaatgttgggttgggtccctactgagttagggggtagtagggcttgagattagaaacttttatttgattacttccagttagaggattttgctaacaatgccaattttggcattattctcaataaaatttaattcatgttctgttcttatagacttgaattgaattacagctgaagaaaactttgtacaaatctagtgtagacaatccatcgactctcttaacctacaaaatacactagggcagaaatcacctatagggataaatgtgtatcgctagctacaattccttcccattacaatctcatatttactattttctgatttatgtataaactctcaacgaactttgatggaaaaagaagtacatggagattgttat

SEQ ID NO: 50258 - DNA, 823 bp, Oryza sativa
ccaattattgtcacttggtacacaaacagtaggggctcatgccttaaccattctttgttgcgtagggagtacttgtgtagggtaactaatagccaaagcatcacaaatcacaaaccagaacttgacagaaaattggcctttttaaccagcacctgacaaccagccaattttctgttacagcacaaagtacactgttacagcacttgacaaaaaacggtgggcctgatcggaactgctggctgctgcagccgtcacgactgtggccgttttcagctgctgctgtagctgatttttagctctcgcagccgcagcggcggcagcagcaagcgctaccgatctctctcagtgtttgacatttccgacctctttaaaaataaatattttttatacaattttataaagctacttaaaatctgcaaaatttttacaatccaaaagaaccatttttttatgctactgctatttacattgaggtgttgctttgttggcaaatggcaaatcacactgaaactctgaaacccgatcatatataccttgacagcgtgaaatggctcgattaatttctctaggataagaacgaattcgcaaatgctcctcctacggtaaacaagcacatcaccatccagggtgcgcacgtacgcagcacattgcaattaccttttttttttcccttgcttttttgcagctagtgagtggagtagtgaccaacttatccacagcaaaagcaagcaaaccatggacgccctcgtatgcacgtatatccaatttatccagtgctgtgctaataaactgttaatccgtcgcatttacggggctgcaggaa

SEQ ID NO: 50259 - DNA, 531 bp, Oryza sativa
ttatttccggtgctctgaaaattcagtaaaatttgagggctccttttagaccaaggagaatttaacaaaaattctccgggccacatttgaatttttcttgcacgtattttagtgtttgccaatttctttttcgaattttaattaattctattattccttttagcgaatgaattttaattttgggatgaatttatcaggacgtgacaaatccaccccccttacaagaatctcgtccccgagattcgaggaggctagcaagaagataggttgggcggtcttctcttcttgtctgacttcttccgctccgtcttctataacaaacttgcctaacaaaacttcttcactctggactgcttggctcgatctcctgttgcagatggaatcttctcttcacctgacttgtccctggttgaacctttagctgactttgactgggttgcggcacttgaagatggggcttcagttccagaactttgcatagttcatatctttggagtcaacctcatacaagttacccacttcatgtcatgc

SEQ ID NO: 50260 - DNA, 1304 bp, Oryza sativa
agaataatgtgcaacagattagataactgatcagggctaattgtgcttggtggaatattaaccaaagtactccttgattacctaccagagccgcaggtcaggctggtcgccgtcgtgcggctgcggccacagctgcagcaacgtgctcgacgccgccacccccttctcctcctccgggaagaagcaattgaacgcctccgccgccgtcgtcgccgccgccgccggcggcagcatcgtcagcgcctccattgccgacgcctccccggaaccagggctctgccagttctcgctgtgccagttctcactcatctaaagccgaacaaattgagtattataatactcctaaattcaacgtccacatgttaaaaaaagaataaattaaattggaaatagttaacccgcattcacgggtatatttgtcatttttgttgtaatttataaaagttgaatttaaacttgtatgtttatggagtgaaatattttcatattgatctatcttatcagttcttttaaaaaaatttgataactattttatactagttacatgcccgtgctaacgctacggcgaaacaacaaaaagatatacaatatattgtttgggctatcaagtatagattcaagacattaattaagacttacatatgagcgagtttagttaagaagcttattagaagttcctcagttattatatactcgaaagggataaacaagccaaataaactacatccaggacaaggttcaaaatttgcaaaacaagccataaggtcgacccattcagtcgacgatgtattatgtcttcaacgtcttttctccatgtcacagaaaaaccagtaagcaaagaacaaaagtctgattgatatattaagttctaaaccgattccaggacacattcagtcaattcagttcaaatacataatcatgcgtttcaacattaattaaagtatcacattcatatatcagtacatggcttggcaaaccacaaagctgaggctgccttaatctaagctacaacaaaatttcttttttttttgcattttagaataaacagtaaaagagaatggataaatcacatgtcctgaagctgtaaatttctacgaagtcctgagcagctcaattttggagagggtagtagtgttgttccctttatggttcatctgatgcatgaagaaggcaagttcaatttctggttcagtaactcttgttgttcctactgcttccaggaagtcatataaaccagaatcgccaagaattttcttgcttgatgactgtaaagagatgaaagttcaaactggtcattaaaaaaa

SEQ ID NO: 50261 - DNA, 868 bp, Oryza sativa
cacgttgtcggcggcgtaggcagcggatttgagctccacgatgaggctgcgcagggagtcgttgtggggggcgttgcgccgccgcctgcctcgagcatggcacggaccatgtggagctggttcttgccgctgaggaagtcgccgtgcaggcccgagcgagcagcccactgctcgagcttggagccgtagtacttgtcgaagacgacctgcaagaacccaccaacgacgcccgcggcggccgcaacatccatcgctgccgctgcgaatgactgcaaacaaacagcggaggtgacgaggtcgataggtagcaaattttgcagagttcttccagcttgctagttcagtttgcggtggttagctttaggtgaggtagtgtgtttgttacattttgtagttttattagtccgatttactccctccgttccaaaatataacaaattttatctcttagaatttattctaaaatataacttctctaccaatattttcttctaactaattacaaccctccgtcattcatttttctcacctatctccactacttatccgatcacaaccctacatcattcacttctaactattttcttaataactgtgtccaactttaaaatttttatattctgtaatggagggagtaattaattaattaattgggtccggtttgatcttgattccactaaatgaaggcatttcctctttcttcgcaatataatactggtaatctgtcgtaatctttgaagaaagggagcaacaaaacaaacacaccagtacactactgattgttattctgaagtagtattattggtgcttaagggcccctttgaatcacaggaatgaagaaaacggaggaataggaaaaacataggat

SEQ ID NO: 50262 - DNA, 652 bp, Oryza sativa
taggctttcgtcagggaccctcttcatcccgactgttatggttagtcgtccccaactccgatactactcgtcaaggcttgcagctaggtatggtctctcgcgctcgcgcccacccgcccctcgtgatgctcccgttcagcgcgtgctcgatgccctactcagcttagctgcagtgtgatgtacgcactcgtatccggctctgtggactgtccttgcttgcacagcgtcttcgatgagttcgatcgatcgatctccagctgctgataattttgcacattcggcgccgttggtttcaacgtgttgtttacagtgaaattcctatgagaaatttgctgcttcccgaggctgattgctgtagtaatttcattttttctttttgttttcttgttgggagtattttgggctaaaattagcgtcaatcaaggtgcgaactgttgatcgtgtacccggaatagatcgaaaaatgtactacatatatatagtgggaatgagctgttatgatgacctaaccagtactccctccgtcctaaaaaaaggcaaaccctgagtttccgtactgacgtttgactattcgtcttatatgaattttttttataattagtattttcatatttgttagatgataaaacatgattaatattttatgcgtgac

SEQ ID NO: 50263 - DNA, 729 bp, Oryza sativa
attggcagagacatcggccaacgtttttttggtcgtaccgaggtggagtagtctactgtagtacaacatttggcggtgggtcggtgcatgcgagcgtcggagccacgcgcggctgccgtgccaatgtcgcgcgcgccgcccgttgcgtccgaaaattaaaggagatcaaatccactgcagtcgattgcaacgctcatttgtcactgatatgtggatccgaagcctaccagactcgtatatcagggacaaaagcacaacggtgcggccgatcgatcgacgcgagactcaactcgccagatcgatcgccatcgcaacaactcagcatttgttgttgtgacttgtcaacagtgatgcgacggatagtatccgttgatacgtgtgctgaacatccgatagtgtttatagctttttatcgatcgattctgcccccacaaagagtgagcattgtggcccacaacggtgacaacggtcggaaaacacagcatagacatagagagatgagatgcatgcacatatgtcactgtgtaataagtttcctttagttttgtttgattgagatgtttcaggaacccccaacattctgagaaaaataaattgaacggaggaataatccggcctactcctacctagctagccttgtttagttcaggaaacaagaaaacgctcacaaatcataattagagcgggaataaagtcatcttactagtggttgtacacagtcctctgctg

SEQ ID NO: 50264 - DNA, 720 bp, Oryza sativa
cattggctcactgacgatgaatccatcaaatgctacactagaacagattatataatctaggaatataatatgataatctcacattttgttgcctttacgtactcttgcatctaattaagcattcaagctacacatgctaactagctttacctcttttcatgtggtgctcatttccccaacttgcaagctactatgcatctaacatcgatctatcacatggtctcacgcatgcagctgactctctgtgtcacttaattcacaaattagtaagattcatcgtcaacagattcgtcgtcgtcagtgtgagcagccactttaaactgccatgtttagggtatgttaattacctttggcttttgtcatagcctgatggctgacatggatgccgacatgatgatcaattcccagaatcggaacggtaactgctatatagtatatatgcttcggacatgaaatggtagatgaacgaatggatcgcgtcgcgtctgcggctgtgaattcgtggaggcgatgtactgatgggctatggaattgaggcctgaaacagaggcagatattgggccttgaggactcaccagggcccgagacctggcacatccacatgtttatttcatatgggccatgcgacgggaccaagagtcgtaaactccgaattccaattccctttgagcctccgttttttcattgtcttggcgtagttgttaaccacgctgatcaact

SEQ ID NO: 50265 - DNA, 1319 bp, Oryza sativa
aaaaattttccaattgtgcaggtaataagcagagaagatttcaagttgctcctgcatgctggcgatgcgctgctgcggacttgctgagagcaaacaaatcttcaatttgcttatatgtttgctctatccttttcttttgtgattttgccattggatctgttgtgtgatgcccatgatcatacggttctcttctgcagtgggcaattcgtagtaattagacgcaaccctgtctaatccctctgctactctgtctgtgtagggcctttcatttcagtttaatctgtaattgaaacgggtatatcccggttcagaaaaacatattggagtagttctcgccttcaaagaatcaaatccctctggggaaaatagattgacatttaggaatggagaggcacaatgcagtgatcagttttcaggctcattgccggtcagttttggcagggagatctgaaacaatgataaaccttggttctgaaaattttgtgctaaaacttgttttgttgcaaaacctgattttgcacagttgaactgctgactcaggatcaaatttattccatttctcatttctcataaagaaatttgctcttcaatgtacgatggagtttattttcctttgaacctgcataataatataccggtacgtgttaatgacagcagattggacacagcaggtcttgaactcttgatgaacgaaacatccccggcccaaccgaggatcacgcggcccacatcaaggattcggccgacgcgatgtccacgtcatcgctggctgccacgacagtatggattggacaagctcaaattttatttttcaatgttcaatggaggtttttttttcttttttcagaaaacctagacaacggtatcctgttggaacgggatactcttctataagacatacctgttgtggtaccagctacatagtacccgataactgtgatacctgttacccaacacctgtaatacctaggatctgatacctatgatactcgtgcaagagaataattaatatgtctatcctgttgcaacgggatcccgtagcagccctctccttttttgggctcagaacctccacagatacctgtccgtttgtagaatcccataagaattcgtcgacactgcggcggtgcaatatcattgcaaatctccggctcgtctaaaagttcagttcatcaaggggacaaattaaaaggagaaaaaacgaaaaattagttggatgttcattgaaatttttagggattgatggtttagcccttgttgtttaccttgtttccgaaacatttgtatatttctggtttgcttttgcgaactatacctgt

SEQ ID NO: 50266 - DNA, 771 bp, Oryza sativa
cctgcagcccccactagggtttaattgccgatggtcatctttagtgcttcctcgagatggggagcatccaaattgttcttctgccacatcacctttgaccttgttctgataccaggtaaactaattaccaaccatcgactattatgttctcaaatattgatgtctcctggatctccttatctgttggcaggtatatccgatcttatcaacgtagaggcatgacgagtacccttcggggtttcctccaacaatccttatcttgatctgtaaaaggcgtatccgaactcctatcctcaactactgtctcgttggctttttaacccaacacagtttaattggttttcttttccatcaacaggttggttattaactcgaggttggaacacagttcctctgaaatgagaccctaggtctcctatgtcagtaaacaattatacacatgatcacatatccgcatctttcaaacgaatcctcatggaacttgtctgtattacacatttctccctcattacatgaatacgaggcactgccttaaacgaaaagggacggtgcttaacatcggtacattgtatcctcaacatgaatcatctctaaacatagcaagctcactgtttacagacatgattatatttatgaatttcatgattgctgcaaactttcgattacaccatgataagtagcggactgaaaaccacaaacatggctgctcattttgattctggagagatatagctggcattgttctagtgactgcatccttgattggttctg

SEQ ID NO: 50267 - DNA, 515 bp, Oryza sativa
tctctctttttttcctttacctgggcttgtaagacactggaacggcttccttcgagctgaaggagaggagcaaagcaacgaagcgtatttataggccgcgatctccacggcactagcactgtgaattcaccgatggctgtaactttcgttcactgaacttctcgttcggagcgcctgagttttacagtctaccgttcgttcagcacttcagctttcgttcgttcgttaactttcgttcgggcgcctgagtatttacagtacagttcgtccgttcgttcgttcgttcgcgcgcgtgaaaatgccaggaagtttcaggttcgatcgggaacgaacgtcgctctccgcggatagaagttcgtggcagccgcaggcagcattgcagcaggagagcaaaagcaacgaaacgaggctaatcggcaaaagcagctagcaacgtcatggggcacaagaaaaattcagagagagcacctcaacgcaaacgttggttggagttggatcagtttgtcaccatcggg

SEQ ID NO: 50268 - DNA, 586 bp, Oryza sativa
gctaaattttatgaaatttttcattatgatgtgttaataatcacaaatttcacatccagtgaccctgatgctagtactagtgaaaattattgaaaaagaatttatatgttttttttccaaaagttaatacgggttttgctggaagtctctaactcacgaacttgtagtgtggaggcccaatttcatgaaaattttctcccaaggttatggtacggtataggtgctactattaacaaaaatttgggttgaaggaaaaaatagtgcattttttcaaaggttaatactcatgggttttgacccaagtctacatctataaatttatagcctcaaggcaaagtttaatgaaaattttatcctaattatagtattaaaaaatttcacacacaacggtcccaatgctaatactagcaaaaatttgagccgatgaaaaatttcttgcattttttttgcaaagattaatactcacacgttttgcccaagggctaatttgtgcttatttgaacgtttgttccaaatttcacacaattatcttaatgccaatactagtgaaatttcgagccggcaaaaaagttcaacagtttgtttt

SEQ ID NO: 50269 - DNA, 667 bp, Oryza sativa
acattgccctggtgcaaaagccaagaaaaataataagggtgtgtttagatggggaactaaacgggccctaaatagatctcaagtcaaaagcagcatgtataagatattccttcaatttgttgactatccttatgcaaaaataagcaataaatgttttgtctgcaatggaaatacaaagtccaccataaactaaaacaaatacaacaatagtttgccattcaggatacgacacagacaacctggctgaacctaataggtgtagaacaaccaattgttagtacgatattatcctatagaatagtcatggcactgtattgctagcgaaccaatacctatgaccatgtgttgtagatatgcctgtggttttcattaggtaacaattcatagaggtttatgcatggtagaaggtactccctccgttccaaaatataacaacttttagccttcaggatttgtcccaaaatataacaacttatctaccaacattctcttcccaaccaatcacaaccctccaccattcacttttcccacctacctccactactcatccaatcacaaccctccaccactcgctttacctactttcttaataaccgtgtccaaccctaaaacttcttatattctgggacggagggagtagcagttttgagtttgtatgttatgaaat

SEQ ID NO: 50270 - DNA, 633 bp, Oryza sativa
aacaagagctttagatgtttctgttagtgtagctgccaagagaaaaaaaattaaagtaacagtaggtagggtgattttgctgaccttagtgagggaactgtaagctttagcttgcaacaattatgtcttgtatgaccagcagtggttgtatgtatgaagtaatctgctctgtattcctttttgtttcctaacctggcctttctgtcctcttccttattaccaaatcatggtagtactgcacaggtttaagagagtaaaaaaatctgtggttgctaagaacccaggactgactcactgaacatgtatgaaaatacctggacacataaaaaagtttcagtttaaatctagagagcatccaatttaactgaatacgagctaatccgcacttcaaatctagacgcaaactaccattgcatttgcagatttgctgactacatgatcctactcaattacatttcatatacttgcgtccatcgatggattgtgtctttgtattcaaaatggaaaatccaccgagatgataagttaattgcatagcacgagacaggtaaaaacaggataagatctggcaaaacaaatatagctcctcccaagagcgaattgctgacatacaacgatgattctttaaaactt

SEQ ID NO: 50271 - DNA, 712 bp, Oryza sativa
cctgcagccctctatcggataccagaagagacatgattatgtgagtttgaaaaaataaataaaaagaaggcaagaagattgccttatattgtgatagagtaggagagcatcaaatttgttcttttgcgcgatgcccctggagaaaagcctttttttttctcctgttccccctgacaatggcattcgaccgttgcgtcgtgtatttttaaaaaaaaactctgcttcttctaatatattgacgtataatccttttttctttcgtgaaaaggagagcatcaaatagctgaaaacaatttaatccaatagctaaaaacaattcaatccaaacactgctgtgcaaaagaacatatgttgatagagcatgtggcaagaaaacccaagaaaatccgtttttctcctgttccctgacaatgtccttcggccgtttgtgtcgtgtattttaaaaatctatgcttcttctaatatattgacatacaatttttttacgcgttcgcgaaaaagagagcatcaaatagctgaatgggcaccctagctgaaaataaatcaatccaaagctgctgtggaaaaaaacatatgttgcaagctagcaatgtcatttttctgcggttgaatgttttagaatttaagcaatcgtgctccacaatacttcaacttatgtctacagacaaagcaagtattcttccggtaattagcatacgcttctcttatacct

SEQ ID NO: 50272 - DNA, 1505 bp, Oryza sativa
aaatggatgaaagtgtgtctcacttcttcttagggagatcaaatccattctcattttatagaaggaatggaagatgaagggtaagagtcatggaataattaattctcatcaattagccatcaaccatcctccactacacaaccatcaaccaaccattaatgaggagtaattgatgtaggttaccaatggaataggaagaggaatagagcaactaattgtcatcaactagccatgaaccatcctccactacacaaccatcaaccatccatcaattagagtaattgatataagttaccaattccctagtcaaatggattaattctcataaactcttcatcccattgatatcccataagaaaatgaatacacatgaattcctagcataattcctagcataatgagccttggaatttatttgatttaaatggatcaattacccaattaaatctaacagtgttcggtttggatccgcgcgccgtctgagttttcattttggatcttgcgtgggtgcaaggaatcgggccggctattgattgggatttgatcagagttcgccgttgcgcgccgtctttttctcgcatggcgagcgtggtagatccgctggtctctctctttcactgcgcgcctcttcctccgccgttggtattcggtttggatccgcgtgccgtctaagtttccgttttggatcttgcgtgggtgcgaggaatcgggctggttattgatggatccaaaccgaacaccaacggcgggcagctaccaacggatccgccgcctttttccctctccgtgcgcgcttgccgatgaggaaggatggccgggagggagagagaaggacgcgccggtcgctcctctcccgtcgccgtggatagagaggatggtgggtcccactgttttttccttttgtctgactgacatgtgagccccacattgttgtttttattttttatttttatattttgcttctagtgctacatcaccgtcacgtaggacgaggaccaagtcaaccggccacgtaggcgccacatcagccaaaaccaccatcaaaaccgctgagggacctgctttgcaccggttttgatagttgagggacccgttgtatctggtcttccggttgaaggacgaaaatcggattcgttgacaagttaagggacctcaggtaaacttattccgagagagaaagagggagaataatgggctttctattaatggggttttgttaatgggcagtatttcaggtccatgttgaattgggcttaactgtgtaggttaccagtttgccactgacagcttgaagagatattctcccccccccctctctctctcttttcgaaaatgctaatggcgatcgattgcccctagcgatcaccctcctcctccatgtggttttcttttttggcactgtattacttttctattttagtaaatttatacacctaaactttgtacacctcaagtttacatatctaaagtttatacacctaaagtttagagacccaaagtttata

SEQ ID NO: 50273 - DNA, 717 bp, Oryza sativa
ggaggatgccgcctagcgcctaccattgccctagtatgcggggtggaaccttgtcactggttataggtccatgtgcaaaaagtgcggtaggtgggtcagtctacttgcatacctactttgcctcgtatgtttgtaagagtttcttggatgttctatcttgcttatctgtactgcatatagtctgccccgaaaaagaagatttttctgttgatatttgttatcctccataattaacttctcagtgcccttatcatagaattatctccagggaatgccctacgttgtttgctcttgtagttggttttgtttgcctcccttcatatgaaaattggttgttgtgaaccaatgtaaccctttacatccagacgtcttttttgtttgttttcccgtggtgctgactttttgtttttagttctatgaagctgagttatcttgttcctatttggtgtattagaataacgctcttttcacatgtttggtggacaggtggagtttatgttattcatacatgcaagttatgtcaatgacacctaactggtttagtttagatccttgtgtctcattgtctcctttgcaagacagaagttctatttgattaaagcaatgctgcaatgtatgttgattgtgaggcaatgactgaaaaggatgattatgagagcaatactgaatcacctgtctgtttgtattagtatgtgagtgtgacaataatattaatgg

SEQ ID NO: 50274 - DNA, 654 bp, Oryza sativa
tatatatatatatatatatatatatataaaccatgcagcaacagggacatgcaaaaaaaaaaaaaaggtcagtttgatctttagtcccggttggtaagatcgatctttactcccggttatttcacccgggactaaagatagcgatctttagtcccggattggtaactcccggtttggaaactgggactaaagggggttacgaaccggggactacaaagggtttctccaccagtgcctggtccaagttaaaggattggtagtatattttgactctttggggagctatgaaaatttgggccagaaaattctaacgaaaatgctgcaagatagagtaaacagtaaactagccccaccttatctgatgtgtacgtatagcttaaaagtgggaaagtagctaggctccgctgcaagagaggcaaattagctcgattgcacgcatacgcgttagatattactcccttcgtattcgtattttaatgtatgacgccgttgactttttaattaacgtttaatcattcttcttatttaaaatatttttgcaaatacaaaaaatacttatgtcatgcttaaagaacatttgatgataaatcaagtcataataaaataaataataactacataatttttttaataaaacgaaatatcaaatatttg

SEQ ID NO: 50275 - DNA, 686 bp, Oryza sativa
gcagccctatgcttttgacttcaaattcaacctgctaaagattcattggattgacttgagcatcaaaattagtgtaattagcaaagcattgctgagaatcattcatgttatatattttgcaccaaaatttgtatcatgttattgcttactattataatgaagcggttgtcctaagtgacattgagaatcagtgttatttgtaataacaactagatcatatccatggtgcttcttgttacaagaaattgatgatcaatttttattaactacatgtttgattttaagccgctgacattgtgtctatgcacagcttggtattacagtaatgtgataagtctaatttcattcactaccggagaattttgtaataattttttatacatttttttgattcacgatttcaattgaaatgaattgaaacatttggatttaatattgatagggcgcacaacgtgcgtcaaaatgtctagttctatttgttgtatcccatcttatcagaaatacaatctttttgggacaaaatttgaagggtagaaatacaattattatgggacggaggtagtataaattaataatttttacgttttaccgactattacctttgataaaaatagttttactaatttatgtcagcgtcccatttaagtaacaccaaataattaaattcacagatataaaaatattcc

SEQ ID NO: 50276 - DNA, 1284 bp, Oryza sativa
cggcatgcatgtgaactgcacgacaacaaaactatactttctccagttccataattatcaacgtttagacaataacacgatctccaaaatacatatttgactatgtttttctattatttatacacacaaaataactaaatgcatgtttaattttattatagtactttataagataaatctgtatatgttgttttagtgcttttaactaaatatttttgaatttattgatagtcgaacttataaaagtttgaccttaatcttgttcaaaatgtcaagaattttagaactggaggaagtattaattaggacgtcattactaaaaattatactaatcttgcggtgcacaaattaatgctcatataaaagcaagttttataaaagaggtggttatcactcgtcatctctaactttatccatataagctaaaagatatagtacataaacgcatacaatatatcacctctagtcattcctatacgatactacctctattttctagcaaattaactccgatgatttcattttattgatttgtccaatccacccttttttttcttgaagtttgtgcaaaggttatcccttgcttgcattagagtgaatgtgactactacctgttttacagtgaatgtgactactacctctggctaatttcatccatctttatctgctagtaaattaagaggtacgagtaacatgtataacaagttgtctataacatacaacccccaataactctaacactttcacattcttatcggagtttgtacaaaggttgctttttgcaagggggtgctttttctctatctcctgcaccaccatttagtcttatgtgttaggacttatgttatgctcatagtgcttgctattactctcttctttattctctccttcaccacatcgtataacattatgtggaatcttgtgataattagtatttaggggattatactattttaagttacctagactgtacatactatatgcatagatttttatataggatatatatatatatatatatatatatatatatatatatatatatatacactcctgccgtcgaaatataaaatgtattttgcttgattaggttaagcttttgtcaaaaattattttactaatatatcatttatgtgatataaaagcataactaagtaattttgaatatgaaactaataacattttgtgtcacaaaaaaatatatgtagagagtgaatgttggtcaaagtatgatttatatatgagacaaaatacatactacctccgttttttaatagatgacgc

SEQ ID NO: 50277 - DNA, 1693 bp, Oryza sativa
gtcatctattaaaaaacagagggagtattatattatatttccttcatcaatcttaatataaactaaagcaactataattatgtactccctccgtcctaaaatataagcatttttccgactctgagacagtctctgagatataactctaaaatataagctttttcgattctgcgacggtctccgagatataactttgaccaccaatatatatatgaataatatgttttaaataaaaagagttatatattatgatagtttttgtttattgataaatctaataacatcaattttaaatgattgatctttttaattttattttttttctattgatagtcaaaattaatgatgtttgactcgttactatttaaaaatgcttatattttgggatatgggagtaactattttgagacagaggtggcacctaactacccattgatgtgacaggctgtgagtgaatgttgttttttttatagctaccactaattaattaatggttttttgaagtacgtttatagcactactctttgatttcaatctaacctattcaaccaagatgggccttcatatatcttgctcgtctgatcgctctatttatatatatcctgaccacacacacaactcccgatcgagaaccctaagcgaccaagcagccggggcgccaattgattttgcttagatatatagctgcatcgcgatgatgatcaacgcatcaggcgagggcgcgaaatagctagagatcgagacggagatgggtgagccccacatccttattccgctaaagtagctaagctgtacataagtccattacattatttgaaattaaaccgtgcattacatcaataattcttgaaaaaggaatggcaatgttgtatttttgtatattatcagaaggatttcactaaagatgaaattacaactggcctctacatcaactaggtatacacaaagcctagacaaaacaaactgattcaaacatgaagatatcatgtagttttacaccaacacactcaaatagaatcaaaacaataacataaagtcataaatatcatctccgaaaacaacacttataatatattgacgtgtaatctttttcgcgttcggaaaaaaaacacttttaaggacttgtaagcaccacgtgggacaaagactaatcaaacaagcatcgtgttagctgaaagccggcctaatactactaagggacataatttgtactaattgtggatgttgagggacaatggttttacaattgagagaggcggattaatctctccccctatttgagggacgtagagtgaaccttttaccattgataactatccagatgggtgggccgaattgggccgcagtgatggtgccggtgtaccgggcactctatcggtggcacggcacggcggcgtggatgatgccgggggacgtgaacgcgatgatcggctggctgtttggtgggccgcggaatgcagcggcagcaggtgccaggccggtcgccaccggggggggggaatttaactattcgccacttttaggtttgccaattatccaaatgcccctcttaggtttgcacttaataatttgccactgaagagaggtaattttttaattatttgccacttttgcctacgtggcgtgccacccgtgcgtgccagcgtggaaaggaccccacccgtcagccctcttctcaccttcttctctacct

SEQ ID NO: 50278 - DNA, 700 bp, Oryza sativa
aggtgagagacacgagacaggagacacaccctattaccttacgtgataagcattaccattattactaatcactaacaattagtactaattaatttaagtgtttagcttggactattctaacaactttacacaatcgctttcatgcaaccatgggctatggtagcatgcatcatgtagcctggtctcatattaggtgctcctaatagacagattaagaagtccacattaggcaagcctgatgttttgacatcgatctagggtttgtagggattctttggaacgcaggaattttatcgaaatttttctaaggccaattggtttgattcctgaaaaatttccaatgaaattttaccattccaaaggacgccatgttatgcaaaatggcttctcctttttgtaaatatgatatattcgtctgagatattgttttttaggtggtcctagaacctgtgcacatcaccgatcacatttgttttttaaagacgtccctatcagacattctgccattcatatgtatgttcaaagtacatatctagctatgttgtgggaaaaaaataacatactcaaaagaaatgcaacggttatgtatatgaaaatatatcactaaactagtcgctgaaactctgaaaatactatcataatgtaatattttaattaatatagcacatcctgtttcaaagaaaaataaaagaaaatccca

SEQ ID NO: 50279 - DNA, 2333 bp, Oryza sativa
atatatatatatatatatatatatatatattaggtgataccccgcgtgttgctgtggaagtgtggatatagttgagaaattttaagcaggcgacagtaccataggcatttgagcagaaaggataagattgatttctagttaaaaagagcacattccaattagcatagctgaccaagaatgtgcatgcagtgccattcagctaaccttttcttttgtttttgtttgcttgagggtcattcagctagccttttctttttctttttttgtttgagggtcattcagctaacctttgctcaaggaagatggaacaacctgactgctcgtatagtggtgttggagggggttccacatggtatgatgcgtgttaattaggggattgctagtggagaaggtcgaagggcaccgcttcctggctttcatgcgatgaggagatttttaacgggccaagtcaattaaaagggccagagcaagcagttgtaagtgtgaggacagataccgttgatctagagacatgctcaagaatccaacggctgacaataatcgatgacgtggcgcaatgtggtgcaagctttatagcaataattattacagtgggtacgataagctgacccaattctatctagactctgtttaacgggcctaaactgaattcaagtgctggaactaaggcagaataagtccaccttgactctcttaaaagtgacccgaatctaatttatgaccctaaaccgtaaaaccggatatctcgacccccgaactattgaaaccggtgtaatttgactcccttgatggttttagagggcggtttcgctgacgtggcgctgacgtggcatgattgacctagtgttgacggaaaacatgaggcctgggagatatgcttaactccagtgcaggtccaaaactcgccttcgggtatgctagcgtgccagttgatttatcctgcaatcaacaagaaatagcgacaaagaacccgcggttaaacctataaatgatagccgatcggctaagtgccgatgacatatcatttatccttgagccgatgtcatatatgtatcgatcggcggtcataataaataagaaggaactagatctactcgatcggctgtagatattaacaatatatattccttatatcgatatatacttaaatcaagcgattgggatagattggtcgccatgccgagacaatataaatcacttagatcgaaatataaattaatgatagaattatatatgttcatagcatagccgatcaaatggatctagcatgtaccggctaatactccgacaccactctatactaagatattaaaacaagtagaatatatcagacaaaaaggtctgatatacttaaatgcggcaagatcttaacataaagggcagatttaacatatccatgaagcatatagagcaaatgtagttaaatcagataagatcggctgaaaccccaatactaccctaatcggcaactagaaggcaggctagagattgatattctaagcacgacttaatagatcaaactcaattgatgcagcattaagtatgaaaagaagaacaatatctagacaatcaagacgctggaagtttcatagagtggtgaatatcttatataatctaagtcaacatcgatatttaacctaatcggctgctttctcctgacagatgttagccgataacaggttaaatagcgatattgccagagattatgtaaggtatatgataactcgatgaattacataaataagattagagtatcataaagatggaagcactaatcccgagaacgcaagccatcataacaagttttacctcttgttgaagatcgaaaccgatgcagctcaacccgaaagtaagaactcgtcgaaataaaactaaaacaaaagggtggcgatgcgccgaaattgtattgaatgtgtgtgttaattgattacatggggttcggggtctatttatacccaaaaattacaaaccatgtccatatcggacacgactcttatctctaacaaactctaagataccataagtctttacggcagacttttgcccaaacatatctctaaggaagttacataaaatatcctaactaatagatataattgccttctcaggactctattcatgcgtggcaattatcttgaagcatatcaactcaacccgatatcgtacaccaagttgtcttgtcggaatcgactgtaccacccaaccaagtctaactcgaattcagctgatccaatcgtagccgatccggactccagccgattcttactctgttctcgtgataatccttatctccgattccgcttcgatctaatccttctttccgatgttgatgt

SEQ ID NO: 50280 - DNA, 2227 bp, Oryza sativa
cgcgagcactgaattttgcacatagtaactaattgaaatcagtaatcctcctgctgcattttctttcttataaatatgtcttattagttgtaactagtagagtcaaatgaatactaccaatgatttaggagacttcctcgagggactaaaatattggatcctcgattaattgatcccttctttctcctcacttcataaaagtgaatcagtttcattggcgagagggggttataaatcaactgatggattactttactaacattattacaaacaaaaggaataaatcgaaggattgtgaccatcagagcaaaggctttctctttgttatttttacaaatcaaaataggaaacccatttgtaggttatggaatagataaaaaaagtcgggttataagagtaaaaattccacaggtcctttatgctctaatcagataaaggggggtaacaactgcaaacataatgggggtaatatgtatgtaaaaaagggctatagataactacaatgtgtattattggaacaagtcagtgttacctttttttttgttgaaaccatgcatgcacatggaaggaaatatcaagatgtacaatcaaacatgaagagaaagaagaagatcttagtataggtggtgccatattaacctaggatagtaatgcaccaggattttatgcattagatggacttactattatcgcatactctttattggtttcattaaatccaccattaaatatatttctgtagtatatttgttttgtgttggaaacactactacattgtttggtcaaactgaaaatatgtatattcaagtttgattagaacaaaccaaaaatgtcttatataattgaacatagggagtacatcaagatcgatgcagtgcatccagcgaacatttgttctgtacctggttttggtgccaaagcatatctaaacctgtaatgcccctaaataactttgctagctaatttacatgtaaagaacaaaactgtattttcagtcagggaagaaaagacattccggtgtttgcaggaaatttcctcctttgcatctcttcctttattaagatagactacattatcaactaaaaacctggattttttttttacttgtagatgaagctctcgggattacaaataaagtagaaatttggcccagaaacacccgtgatcatccaaagaatatatcgatttcattgaatatgtgccagctttcacaaattatatatcatgcaattttaccatcattctcatcaagtgtaataggaggacctttttataatagtcctatcagtctcaaactataaagcatattagttttcttacactgtctacaatattatattttaacaattagtttcttcaataatatattatcaagaactagaaaattacatcatacaagagtgctttcaaatatgaatcttaggatatgaaatggatggcattaaacatatacagtatattgttagtttgttatttgtcaaaacctacatatgttggttttgctaaaactatatatggccaccttatattttaggacaaatggagtatcaaacagtgtgacatttgtaacctactcaagaatggtctgctcaaaagggatagaacactaacagggctaactttagaggcatgcctaggggaggggtgcctcctgtcgaggcgtcatgtaaaaattggttatagtaaatgtacattttctcctattaaaagtttatatattgatcctaccaagtccttaaaaaactcataaagatgggctttcggctttcgtcaatccagtatcatcagttacccacatctagagttcaaaataaaatctagctctctaatagaatgtacagtaccactctttgaccattgcatatctcaacagattgtaataccaccttaggccaggatcatgcaaaaatatagtattagtacccactttagttttctgaaaatattgcggagatgtctgatttgtaacacataaccttccaaaatggggaataatcttttttaggctagctgcacaaacccaatgggcatttgatataaaagggtgcaatttccaccaacatttacatcaaagactcaagttttctgaaatctttgacacccgcagattttagtctatctcataattcaatgacatttgttcgtggtatctagaagaataggaggtatgatccatccaagtgaaatgtaatacaatgggaggaattaatcaaagcagccctccctt

SEQ ID NO: 50281 - DNA, 715 bp, Oryza sativa
gctcccggcgcgcgcagcggcgacggctcgtgcgcgagacggcggtggcggtggctccccgcgcgcgcagaggcgtgacggcagagagaggatggacggggatgggagtggcggtgggacccacctttggcagtggaggaggctggctacatttggccagccggaggagcaatttggccatccggatggcttggctatccggatgcagaggctattggagctcgttttttctctatgttagctaaattttaacttggagagccaaatagagattctgttgaagttgctcttgtgccgccatccgtcgaagcgaccataacgctcacaaagccctttaccaaattcaactattattgttgtatataccaaatccaattcacaggttgagcggtttgactgttgtccggttcagttgctagttaaacagtcaaataaagcaaagtatatcccaataacacacgatagcaatgttgctttggtggctagatgaacttgagttcgaatccttacacaattaaggtaagcatgaaatcatctttaatctatctattatatactaaaagttcattaaattttttacaaacgctcctaagccgtcacggggtactctaaaaaattagagaaattcttaaaatggcacaacatggaaccgttgattttttattaaatttggtgacccattacttgtaaaaaatcatctcgttatcccataggc

SEQ ID NO: 50282 - DNA, 619 bp, Oryza sativa
gttttggtttaacaaattgtttagtgtgccccaatatcaatacgatctaaaattacacaattatcgaacttcaatacaaagagaagtggcatacaattaacaaaacaatatgcagatttacactagcactaatacttttcacacgcaaaaccggttgaaggtgaagccacaatttttacctgaacttcacggaatcggcgacagcgcaataagacatcatcgaatcagggttcagcaacggcggggatgaccctggtgggggcaagatggggcaggcatgacgaggacaaacagcgcgggacactgtgccgacaaagcctccggatacgattttgctaaacgttagatggccataaggctcaaggctcggcacggccatctggcccgacccaaacatggcatggcatgactggtgacgggttcgtgccggcccagcccgacagttgagccatgcctgtgcagatgacttggcacggtggcgggccggcccagcatggcacacggtccaatgagtagcaagaaaaatagtagagggacccaaaataaacttagttgccatataaacttatcgcctaaagagaagagggatgcaaaataaacttataccaaccatataaga

SEQ ID NO: 50283 - DNA, 827 bp, Oryza sativa
  unsure (1)..(827): unsure at all n locations
tttgaaattagatcatttttttaaatttgtgtttttacaaagtacgcgaaggtccaccctcatggacaggaacaacgcttttttgcaacatatattttatacgaaatctatgctttctgtaaagttaaagcacactaaatctaaagcttaatatacaaccatgccacatcatcacccactagcaataattatatatttaatctcatacaagcatacaaatgatctacaatttatttaattatacaaatcaaaatacaagcatccaaccatcatccgtctccgtcatacatttgcacaatatttcaacaaatctatctattacttttacaatatttaacatatacttatcaatatgtttcacactaaagcacgagtattatttgactgataaaccctaatgttttgttttttttcttcgtaatcctagtttgattgtaaaaaaaacatattgagaatttcttagtaaattttacaacaaagcacgggaaagcgtgaggaatcacctagttatactatagttatactagtttcattgtttgtcgaaccacagtgaagaagaatctattgattaatagcaccgggcttgaaatcggtgcatttatacgcactcatgtgactgctgcaagcctgcaacggacaataattaaaatgaatgaaaaaaacgaacggtacggagtttacttactgttactggattataacaagctggtctgacattgcgcttattcttctccgtatcgncattgaccttgtctacaactaggtattgtacttgcatcctataaccacttactccggagcaagattattgcaacaagtacttgtca

SEQ ID NO: 50284 - DNA, 905 bp, Oryza sativa
tgaaagatattctaatctatacagaattaccaatgcaaatggagtgagcttaacttctgttaaaaacaaagggtgggagtctattactttcagaagaaattagacaggagatagacttgcagactggatcaatataaaaaacttatgtgagacggtaatattaccaggagggagagacaccttaaaatggattttgacaaaaaaatggagagtttagtgttaaatctttttataaagctctgaaaacacatgacacaatccccaggccaatagggatacacaaaaaaatctggaaaatcaaaattccttttaagataaggatttttatgtggctgatgatgcaaaataggattttaaccaaagataacttgagaaagagaggatggaaaaaaggaacagaaacatgtcaattctgtgagaaaaaaagagactttgcagaatttgtatttttgattgccctatggctagatttacctggaatatggtttgttgtgcttttgatcttaaaccaatcagaaatttacatcaaaccttggagaattgaacaaaaaactgtgatagaatgacatcacagctactgctgattggagttgatagaataacaaactgccatctgatccttctgaaattttgtttgctgcttgtaattggatctccgattggggtattttacagatttcggaggaaaggcaaagaaagttgctttggggagccaagctcctaaagcaggtctcaagagaagtctttacatcaagatatggatggatatcgagcgtgtgcaggctggacaacacatgaagctggatggacaaaaaagagcagaagatagagttttttttgtggaccggaatcctcaactaaagtctggttcagttctgggagttattgcccgtatgaagatcttt

SEQ ID NO: 50285 - DNA, 2519 bp, Oryza sativa
acaaattttatcttagcccaatttatattgagatttacaaattaaaattagttcttctcttctaggcttttaaaatcatttctaataattccttttaaacaccaatttataatttaaggattttaaacaagaaaagctcttaacaaatataattagatcattaatgatcaaataattactgaactgttctttgtatcatttaggaattgagctccgaaaaatctgagaaaatttcagagagtttacttaatcatgaagaatttaataaaaattaaatccatccatgctttatattaaggaaattttatttcccacatttaacttcacttgtaaattaaagatcatttaatacaaattctaataataatttattaaataatttataaatcctgaaacaaaaatcaggatgtgacaccctatcaaggatcctaaattaggtaggcacccaaataatctttccaagcccccagtctcaggggctctactgcacagcccccatccacggttggaaaagctcgggagctgcccgacgtggtcttggtccgccggcacctcccctgcccagtgctcattcccgcccggtgcggctcctccctgcctaccgtgtcatccctcaagtgcattcctctacccgacgctccttcccggccgacgcgtctgctgtacctggagtctcctctagcctgcaccctctgcctgaactcgatgaaaaacatggcccagtggccgagtcatgcgatggcgtcgaggcactggatgattcaagtgttgttgcaggctgcaaaattgagaaagtagtagcagggtagcactagcagctgcgattgtgggacttagaagaatggggaaagtgatacatgcgatgtgctatgcagcttttttgttgttttgcttggttgttgcttcgtgagagaagtagctggtctatgggtggatgagaagacgggaaaaatcaacacatgtgagaaaatgcatggaagcgctacagtagcagaagctcgtttcacccgagctatgaatacatgctactaggatttgtatttccattttattttttttaaaagaatcgaatttgaattgtgaatttaaatatggttggattattatggttttatactaggagtagcgtagagtatagaactatacatttgtactttaaagtatatgttaaaatagaagatgaaatgaaataagggacgagaaaagggactgctgctggagttaaaggtattttttaggtacttagaaaatgggggaagcccccattaaatttttagaggctgtaaaataggagctattgctggagatgctctaactagccaacacatggatgtcccactcgtataagagcaaatttaatagtatagccaactatcaactctaaatcatctaaagttaatctaatagtcaattcatataatagttacatataaatatatattggtcccacctgtcatacacatagtgtcttagaatccgtgttgtagcaagctacaaatctatagcccacgcttctcttctctctcctctctaatctcctccatatgcttatagctaacttatagtctattattcacactagtacagatcctctcatctgtgacggcccatcacatgcctgggcaacgtggcccgtcaaaacaaagtcatctcaatcgggcctaaatttttgccgttgtagatatactcgtcggggtgcatattcctatagcccgtcaccgatgacactcatttgtgacaggcttgaagttaggcccgattgagatgacctccactatctcaatcgggcccaaatactgagcccgtcatagatgagtgtcatcggtgacgggctccaaagaaggcccgattgagatggcctgaatgcccgtcatcgatgactcttatcggcgtcgggcttctatttctgcccgttagagattagtgtgcgcccgttagagatgacttttttttggcccgattgagatatactttgcacactatatatactccagcagtccgttgtctgtagttatcccactaataactattttggtgggaggttgaagggggcgaatttttgtaatttttttgcaaacaaaaacatgaaaatcataaaagtaagtaaaagggtactaataatttcctattaatttagtagtacttatgttatgagatgttaactaatattttgttcattgttcagcgatggatcaaagttggatgtacatgactggcttgaggcgtcagtacaaggagtatagagatggcatattaagttttatgaaagccgcagtggaggataggataagaagaaacgacaagtacatgtgttgtccatgtagcgattgcaggaatgagatttggttggacgatgaaaaggaagtacacgctcacttgatacgccggggattcatgaagagatacacatgttgggtgaagcatggagagcaagatctgggtactgatggtgtagctgcggatggaagtggtgcagacaatcatgaagaaggagatgaagacgagcatgacatgtttgt

SEQ ID NO: 50286 - DNA, 952 bp, Oryza sativa
  unsure (1)..(952): unsure at all n locations
ttaatgatctctgacgacatgggaagaatcctaagtttgggcaccagttaaggttgccaacccctaatagcacctgactccactgcatcaccaatggaggcaatacttgccactgcacatgttgcaaaaatgataagcaaaagtggaattcattcatgacagaaccaacatagtttcttgttgctttcatgcatcatgtgctggcaaggctggcttcatgaatcttggctatgttttcatcctgtccaaaaagaatcttgatgaataataacaattaacaaagtaatgatgattgtaattggagccttgtgtgtggctctatctacctctagtctccatgcatgtgattatatggaaatatggtagggatggctgttgcaccagtgttgctcaggaaagagattaaaaagattactgattttgggagtggccggtgtagctcaccactcatatgcttctggctatagcttcttctgaccaagatatgtagcatggtaagggagaagcaaattgttggagtggagtgaagcctctctaaccaattggttgcaaccttcactacttctgtaccttttcagttgcttgcctgtatttcattggtgaaattaatataattgagctgcaccatatgtatatacttatctagtgggaaacctgaaaacctgtaatggctgcaaattgatatgcaaattataacagattatggaaattaaggaaaaaaaaacaatatttgttgttggagacttggagttccctttcactttttgtactgaacttgaattttgtatttgatgtatttatgctggtgactgacagttctatgagaggggacaaatcaatatacccttctctgtatttatatgagnctatatatgagagaatgagagatagagagagaaatatatttgggagagagagttagttggatcaaggtcgactgttcagagcgaac

SEQ ID NO: 50287 - DNA, 552 bp, Oryza sativa
attattgggatgttggttagggaatttgttggatgagaattttggttaaaatttctttaatttaaggatagggaatagaataagtaatctgttgggcatgctctcagccctgaaacttaacctgaacagatatttgcagtcagggccgttctagactgctcctagttggcttagctacttccttgtacttcgtgagcacacgctatcaaaatgttctttttttcaaatgttttctatatataactttcttaaataaataaataaataaatctatttttaaaatttgtaatagctactccctccgtccctaaatatttgacgcagatgacttttttaaaaaccatgtttgaccgtccatcttattcaaaaaaatttaagtaattattaattcttttcctatcatttgattcatcattaaatataatgatgagatgtgagggagcaaggcactccctcttttttaatacctgggtagggtggctttactttgcctacgtaaatcccaaccatctgtcttcatttaagatctaatctccaattaaatttcctatc

SEQ ID NO: 50288 - DNA, 1091 bp, Oryza sativa
  unsure (1)..(1091): unsure at all n locations
ctcgctcgctaccggccggtgcttgatgttgtgtatgccgtgtgcgtgttcgggaggttttcatgtatggttgttaattttctggatacggtactgcgacttcgcgagaggtgatatgtgcgtggatggatatccgatgagatcttttgccgtggtcctgactaaccaacttggtgaagatgacaggaaatgaataggtgagaggtattgtaagtccgtggttgtacgtatgtgcctgacatgcatgtatctaggtcggtatatgtagctgtagcacaatctgaaacttgcaattcaggcaaattatcaacagtactctggatcctaattnccatttcccgggttttttggcaaagcatgattgtaaataatggaggttgtttatgaatataagggccagtatatataccactaanttgntncaaggaaaatatttacgtgcaatctgtatgactaagatatcaaaacacaaaaaaaaatctaaaactaacaatattatcaactctttaatttccaatagttgattatgagatttctattttctaatgtactgatacacgtaagtttttaattttttaaaaagagtaaaaattatatctcagatactatgatttgcatcactagatgttacaaacttgctacataattaaatgtcaaaaattaacccatggttgtgaacaattgttccaaaatataaaccatacatgcatacatggctacatcctagatcaccatcaccgtaaatagtacttacttcgtctcataaaaaccgaatctagaaccggatataacaacacattttagtacagtgaatctagacatagacacgtccaaattcgttgtactaggatgtatcatatctaatattagattggattttatgggacaaagggagtggttgctcaatcttaaaaaaccatatctaacccttgtttttttcacctcatatggtgtggaccaagcgattaatttctcacccaagcagccgtacgtcaccggtgacgcgtgcaccccacatgcaagcacacctccatcatcagtcaatgtctcaatctctcatgtctgctgccacagttactggaagaagagca

SEQ ID NO: 50289 - DNA, 1020 bp, Oryza sativa
tagtatatgccacttattagttgtgatgtattgctattcatagttcaaacagtagtgtcttttgtttaaaaggtaactgcagttgagcatggtgatcaccagcgtgtttcttggcatgtgcttcaagcctctcatactcacaaattcaggtaggcacaaagaatttatgacaactgcgtgtggtctttaatcttgaaaacgtggttttgacatggccgtagcccgcaagtttatggagcttgattcaactgaaatgaaaattgtgatttcaatttttttttgtgatggctcggtgcagggttgcttgaaaacctgaggttcagtgaaggaaacctcaaggcctaggtttttgccaaactaatatccccaaatacagggtttgccaaatttgccaaactgatatccttgataataaggctctgttttacacagtttcaaatctaagatttgttgaaggtgcgtattcataccttagaaatccatggatatagatttgtgattatattaatagtatttagataaatcatttatttatattttatagaaaatataaaatttcaaactactgtaatttaatgtaaaagctctaagcccagcaagaatatatctggagagctgtgccaaggaattcgaacagaaaattcttttatggatctgttagaaattctccatcacctgtgtatatgttcgagtaatggagtttaaagggttcgatcaaactttggtttgaaactaacgggtactctctccgtcccattttaagtatagttgtggatttttttttgttattagataataaaacatgaataatattttatacgtgacttatttttaatttattcctaaaattttcaaataagatggacggtcaaacattggatatgaaaattcacaaccgcacttaaaatgaaacggaataagtactccagaggtgaaagaggaggttgggcgtcaccagacggcggcgccatttcctccctgccggtcgccgtactccggccgctggagccatgctccatg

SEQ ID NO: 50290 - DNA, 1234 bp, Oryza sativa
tccaaagcggatgaaaacgtccgtgcgcagcgcgccgatgagcatggcgtgcgacgccgacgctcctctggcctattcaagcaaatgcttactaccaattgtcgtgtcagagaagataaggccactgcgaaggatgaggttcctgagtagcactcttggttgctccatggaccagggttcacaattccgacgaaaaccggtcgaattccgcgaaatttcgacgtctcgacacggctcggaattaagtttcgattggaatttcgaaggttgaacagtagatttggtcgaaattcagtcgaaatttatcgaaaaccgatcaaaatttatcaaaaaccgtgataccgatgagactcgaaatttagtggtcaaccggtaatgtaaaccctgccatggaaaagatccgtgaaattgtctgcaaaacaccacctattcttggatgttctgaagagaaccttcacagaaagataagagtttttggttaccaatcttgggatgtgtttagttcacgccaaaattggaagttttgttgaaattggaacaatgtgacggaaaagtaggaagtttatgtgtgtaagaaagttttgatctatgtctatggcattaactacattgccatgtaccccgaaaaaaaaaactacattgccatgtaggatttttagcttacgtaacactatattaattaagagaggaagaaactgagtctcatgcaagacacgacttcaacaagagaacctatgcactataaactaacaagttttgcattaggagagaatagtgtcttcataacagatgaagaataaatatgattggtagagaagagagatgatgtatttattaatgatccactttaagaaaccatgggttgcagagtgtagtttctattgtgatatcttattgacatggcatcatagacactacttatggacactatgggttgggactgccctaagccagctacaaacatattttaaagagataaaggaagagagagaagggtagcgggctactgatatgtagtcaggtacagcacggactccaagacataatgtatgtatgacaggtgggatcagatattaatagtatagtaagcaactattgtatgaattggttattacattagctatagatgatttgaagttagcagttggctatacttaagagcaatgtcaatagtacagccagggtttacactatcggttgaccactaaatttcgagtctcatcggtatcatggg

SEQ ID NO: 50291 - DNA, 547 bp, Oryza sativa
agtaaaaacaactaaactcccttaaatgtacaatatttgagttgatagtataaagagctaccactcattgggtgaggaaaaaaaaaggtcaatagtaccatttctactacctaaagagaccaccataaaagtatactattttcttttttctattttatattataagtcatttgattttttttcttagtcaaatttttaaaattttatcaggtttaattaaaaaaataatttttagatttaatgaaactaatatgatatttttagatattgctagatttttctataaacttaaacaaacttaactaacttttaactttttaaaaaataaaacgacttcttagatatgaaacgtaggaagtggtacctaaaacgttcgtgatcaaaccttataggacgacagcgacggcgaggttaccctccctccccccccccccaccccacacacacacacatattacttacattgtggcgtgttacttatttcccatgtgataaataaaaccgatgaagcagcagagtgcacgatatgatatggcagagcactagg

SEQ ID NO: 50292 - DNA, 519 bp, Oryza sativa
atttgtgttgtgtattggtgcgctgtagaaccgattcggtgcaccgagtttgtttcactcgataaaatactgcactgcgctatgttcaattgttcataaggttttcactatgtttcaattattcatatggttttcttcaatctcttttttcttatttaatttctatcatcttctttttccttattggaagtaaaccttttgcccatcatagatataggttataaacagatttgtggtcgtcatgggtgtgatagtgatgatgcgtcattcacgacgacgacctgtacttagtttcccctactcttgaaagctatattttgaggtaatggcaagttattgttgtacagttgaaaaaaaagtaggagcatatttatttagtttaatacttccttcatcctaatttaatcatcacctaaaatttttgagaattttttaaaataatcatcatctaacaaagtgttactttgtttatttgtgaaaatagtaaatgtgtatcgtgtaatgtgctgcatgcacaca

SEQ ID NO: 50293 - DNA, 1126 bp, Oryza sativa
ggtgctcataattacgcacatatgcttcagtagagttttgtgcaaatttatccctatccttcgtatgttcatcttgctagcttaacgaaggcaaattcagggtgagtgcatatatgtcggtgtacttatgtacgtcgttcttcacttaatttgtgaaagagaaaaatatggataagccataccattgctcgcgttgttcattattctggtgatcttcttgatcaatccaagcgcaaactctatgttcactaagttggatgatgaatatttcgttcaactacggatatttgatcaaactatcatgaaactacatataagatgttgtagcataaaactataaatttaagttggtgtagcacaaaactacagatttaacattaaatttattagaaaactataaatttaagctaaatatcataaaacaacatatttaataataaaattagtacaaaatcacagattttagatcttaaatccttagtaacaatattaagtttgagttgtaaaggtcttacgtatttttaattaaattggagctaaacatatagtttagttttgtgatactccttccatgataaactactaaagttgcccgtgcattgcaacgggataaattcttattatgaagaaatataattataacaaaattgtttcataccattgaaagttcataacttttgtgttatactattgaaagttcgtggtgtagattaacaacgtctaaagcggcgagaattttgattacagtaaactaattttccgtattatttatgagggaaatttgtattattttaccacttttaagaatgaaacctttccaaaccgtcattcttagttcttagaaaattgctataggagagagaaaatgtttttaactatttgctacttttgctaacgtgacacgtcaactcacaccgccagcacaggtgaagagcgtgaatgtccattttacccccttgtgggccccaccaattatttagagagaggcatcttggcttgccgatggcgtcgacctgccgatgtacattacatcagctcaatgttacacctacatgctgggctgctatcagataggccacaacagattgtcacatacgatgggccagcctaattaggcccaagcctg

SEQ ID NO: 50294 - DNA, 1618 bp, Oryza sativa
ggattatatatatttttttcaactggatataatataataaagatcaacgctttttaaaaaattttagaggaaacaatagctggctagaatattgtactgtgtcctactccggtgctttctactcggagtagaaagtaatctaggcccttgatcatatttaattataggattaagatctagttctactcctatcagaattagtggaagtagaaatgtggaggggtgtttttgtccaggaaaaataattcgcgaaggggtattattggtttccgatccatagatcgatcagcatgtcatcctcatcggagttggtcgtgcaagatcttaatcgatccatgtaatccatgaaacaacacagtgatcggaaacggcagaaacgaatgagccgagatgccgccggcaagcaaatgacattgcgtgcgtgcgtgacgcttccgccgaagcccaagcccggaattttttaccttaaccccccccgcagaacacctgctcaagatcgtggctcgctcggacgccaccacactcgtccgctcccagacggacgatgcgactgaggaagcggacaaggcggtgatggcgggaatacggatggcgacggagggggcggacaaggcggcgaggccgggggaggaatacgaggtgactgcgtgcaacggagttcggacctgatacgatgcgaacagaagaaaacatcccatgccaaaattacccctaaacgatattaggagattacttacctgtcctttaaaataaacagtcaagattaattctacttggagtagaatactgcaagtagattgcaccggagcattactcatgtttttttatgtttcagtttaggatgcaattttgcactcccagagatatatacatatatattttattatagttattactgaatttagtgcgttggaagagtttgtctgcctcccctctctcaacagaaaatgtctatttgtctgcgaggatgaactagtaatgtcgttgccacatatagtttggtcggctttaaatctgtttctgtagtggctgattaagacttaattaggagtcaataaacattatttcgaagttcatatatgttcatccctatctactcactagtcactacatataaagtttgcttcatggaccatcatgtttccacacaagtaataaatactttgccttcatcaacacacaactagccagtagtatttctttttccgaaataagatttttattttatagccaaaaataaggtcttaacactccttttttttggggggtccttgcaattctactagtccataactaattagatatttagcactttaatagcaaaagaaaaaatatccctttttttgctcattatatatatgtacattaatttgaaattcttaatattccatgagagttaccaggcaccgatacattatatatataattaattaaagcatgtcaacactccacttttgattggttattttttcaagatatatacaaacccaaggtttcagtatacaccaaatcccaactaccatcctaacagatgtcattttttttcaccaaatgtattcatggtcgctgttgacttggatgtatataaattacgcattctgttaattagggccatatg

SEQ ID NO: 50295 - DNA, 2394 bp, Oryza sativa
  unsure (1)..(2394): unsure at all n locations
tagctctccacgattaaattgtgcgggacggattgcgacaacctatgttcgattaattgttggtactctcacacaacttgtaaagctctaaatacatgcttattgtccatgtcaaaaaaaaacatgcttattgcattgtatatatactgcaaatgcaaatcgatgatcatctcttgaattcgtcgcaaaagtttgttatggtcaacatctatgagcccatacattcccacaggaggtaaaccgttcgagctctgccattacagccacccaacagaagcagaaaccctagtaatggccaatgaggcagcgtacacagaggggtggttggcttggctgcatatacatatcctgatcgatcgaaaagcccaaatttgcagtcttttcagcatgggatgcaccgcagaaacaagggatgcattcaatcttccatgctgctctgttcattgtgtttgggagatttggagcaacacatgcatgtacaagggatgtgatcagagagcagttagttggcagtgtgatatatgtgtatatttatgcactggctgcattgaattgatgagcttgatgtacacatgtaactacatgtgtgngnctatatatatatatatatatatatatatatatatatcggggatatataccctttctcggggtttcataaaatctctctatattttttttaaaaaataagtatataataaacatatgtactgcacaaaagatataccatttaatttcatttttatgagcttaatatagggtcattttgaggttatttaattgcttgagcatgccctctttgtataatttgcatttaatttgtctgcagctgttctcaacattgtcatccaaggtggtaactgattgatctatatcatgggattccatacttgattcccaaacagatgtcctcataataattcttgtcactttgtttagttttagagaggcatgcacatgtttatatgcaaccaaaaacaggaagctgtttaggctaagtaatgagccacaaccaaaagtctgttccaaaaggacaagtagggcccaggaacaatggacaaaatctacaagacaaaagcaaatggaggaaatttgatgcaaccaatattcaaaaaatacaagaaatctaaatttgcagtatgtatacataatccgtgtttcttcattttcattctgtaaaaagtaattttgctagctcttgctaaatagaccttcgaaggaaatgttgacaacagttgaattttcaaaactatttaagccaccaaggaatatcataatttctctggttatcaaattagcttatctataagattgacaatgatatctaccatcacattcctggaagcaaccaatcagccaaatcagttgcattggtttagcataaatgggcatccaaattaacatagcatctgaattttcaagtcaaagcagtttcacctgtgagatactgatgttgaaaagagaccaagacctattaacaacgaattgtatatgatttctggtccccgattccgttcaagaaaacatgaaaacgcactcgcaacagccggtaatatatgagcaataatttagtacataataatcaaagttagttttgtcattctgacttggcatatgttaatggtgtagctttaccttgttgccttggaattggttttggttcctggaaagtttgttagtgatgtatcaaaagggtgtagatgcaaagaaaaaagtcggaaagctatctctctggatcaatgtagtatagaagaagtttttgcttggtaaaagattgtgagctttgacaaaataaccaccacacaattgaagagattaatgtagaccctacaattagttaaataaaagtcatattcacatatatgtatatccattcgaacaaccattgttttttcaggaaggtgtttgtaataataaggattgttttgtcctcagcagatgcatgttatggcatggttatccttgagaattaaccaaaagtatcctaactttgcaagattgaacattattaatatggtatgtacatatatatctacagtggtttgtatatgcaagcaacattttgcactttatatattagctaaccattaattatctaaaaaattagctggccatgctactaatttcagccataattgaatattatttgtccatattatgagcctacatacatatatatatatatatatatatatatatatatatatatatatataaaataagaaaatctgatgcgtagaaatgtttctttcagacatattaccaatgatcattacttatacatgtccacggagagacgatttcgttttctccctagatgcacaaagacgtaaacaacacacgagcatggttagataacatctttaattaatttgttgttaattaacaatattt

SEQ ID NO: 50296 - DNA, 688 bp, Oryza sativa
tttaagccccgccgccaagggcgtgcttcaccctgccgcggcattccatcgaacacgttgtgcgcagccgcagagccctagacggctgcacccagccgccttttctcccacaccgcgtgcgagctctccgctcagatggagaggtatgtgtcaaattttccttaagggtttgatatattgtagtatttacaaataggtccctggtttggtagtgtcttaataaagttttaaacaaatcctaggacttatctgcataaaatcgtgccttctttctcgccgtttcatgctccatatctcgatttgttttcgcatggaaaggaatttagggacgcctatgtatgcttttgaccctaatcctgatgcgaggctttatatttctggccagtttaatttggcattgggctgtatgattgagctgaagatgtgattatggtgcggattaggtcaaaaaagttaccaatttgactgtttttcttgtgtttatgtgatcaaggatggccgaattgcacagtggaaatgcagaaccttatgatattatcttatctatttgttgagttggttttgaccagtgcagattctattgtgtggtcaccagaaattctatggagatcttcttttttttattgtagttgcaaatttgcaatgatgcttggattgattttgtgcgatctcatcaaacaaagcttag

SEQ ID NO: 50297 - DNA, 1088 bp, Oryza sativa
aaaacacaggaaaaacacagtaatagttgtttgattggagcacaggaaaaacacaggaatcggatgagagagatagactcaaagggaattttccaagaggttagagctcttgctatatttcctccaaaatccacatacaatgtgccattctataggaatttcataggatttggaaaacttcaatcctttgaatcaaagggctaagtaggaaaatttcgtgtaggatttgaatcctatgaaattcctagataaatcctttgattcaaaggggcccttacacttacattcttatcaaaatcctacgtttttcctattcctacgttttcttaatcctgcgattcaaaggggcccttagataggattcaatcatttgcttcaaagggtttcataggaaattttcctataggattgaaatcctctaaaattcctatgtttttcctccaaatcaaaggggccctacattctatcaaaatcttaagtttttcctattcctacgttttctcaatcccgcgattcaaaggggcccttagtacattacctcatatgcccgatacaacattagtggaaaatttcttgaattatatacccataactaaaggagaaatttaggattacaccatcatcaaaagtggcttcgtggccaaatgccactacttaaaaagaacaataaaatatcactctcaaccagacgcatcctggacaaaattacccttggggctctacttccttccttcatcaccgttgttcttgccgatggctattacgcgccatatctgtggcttcttggctgtcaccgacatgtacgtcatctgctgctgaaatatcttgagattgacgaagtcaacacggacgcctcactgtcaaggtttgtcgataggtaccaccgaaagaacaatttaattgtaaatacgagcacccgtgtaaatctacaacttgaacctgggtgagctgatttcataattataagaaaaggggtaactagctaactactactagtgagtgcgctcacttcgattcttttttctatttggtttcacttgttgaaggaaaaaacattttagaagcataattatgtgacaactctacgc

SEQ ID NO: 50298 - DNA, 1383 bp, Oryza sativa
atatagacacatgcattttgggacggagggagtactaactactaaataatgtctcctacgtacccatcgatttcatgagagcttcaccagcagatgtcttgtcctgctgtccacttcaatcgtttgatcctcgttaagcagaaaacagcaagtatgtgtggtgctctgatgtggtacaaagaaatttggggtatgctatcgttaattaaatgtgcgtttcactcaaataccacttcacaaaatggatttgataaaatgtcattcttgatcagaacatctacgatggattaatgtcatcccgggcaaaattgccgttgggctcctcttcttcctccctcccgtgccaatgcgtttaccgacgaccaccacacgtcatgtctgagcatcaccaagcctaagtcatagaggttccatcttgtagaggccatccaagatttggcatccgcaagaccgggtttgaccagagagcgccggtgcaagcgggactataagtgggttcacgggcctggccgcttgcatccctactaagagaacgaagaagagattggcagagtgatgatggagatcagcttgacgcgacaggatccattgctgacctcgtgctctagccgctgcaagaagagtggcactagtaggaggcagaagactccaagggtaattttgtccgagatggcatcatcccaaatttatcatctgtcatttttgggtatataactggagaaattgtatggtctgttccttaagagtatcaaaatttgaactaattttgatacctatcggctatctgagataatgtagtacctctatctgatacccaccgtaaaatcactcatattactcaatccatgtaagtttgattcctgatgctcatagaattttatgaatatgtatcttattcttagcgttcgtgtgttcgtcatgttaaagaaggcatgcttagcacggctgcacgtaccgatgttctcgaatgtgcgtgtcttttacatccgaaaggaaaaaaagagtatcataaagtcgattgtacattcgtagaggactaacaggcaagtacttgacttgagaaaaagaaacaactttcggcggttggcgatctggtttttcaggttagcaaaaacaagtgattcttccaaacatgccatctgtgaccactacaaaccttctttgaaggcgatgccatgatgtcccttccagtggcggacccagaaaaattgtactgggtatgcccatttagcaatcactccgcctcatatccttttaaaagaaagctcccaattacaatgaaagaatttggcggattttagtcggaattttacacatttctattcagatgtggtccataattcatgaaaaatctataggatttagcctaatcaatcccatgtc

SEQ ID NO: 50299 - DNA, 690 bp, Oryza sativa
tgcaaacaaaaactcaaaatcccttatattatgggacggagagagtactaataactaacgacgacgctcctcaaatattagacggacgtgtacatatgacatgtaaatccacgagggtggatcccacatgtcaggggcatacgtccctctaatgttagtggagctgcttctaatcagcattagagtcgattacttattttattttattttactagttatgtgtactatctctgtaacaaaataaagaagttgtccaaattcgtattcatagagttaaaatagcatatgttcctctttgctcgctattctgtttggtacaatcactatgaatttagcattttgaattgagtaagatgttacaatgccattccgatttccgattttgcttattattctgcttgttaaggtgttcaatggcgctcgttacatctttcacggcacaaattctttgacagctacagagggggcttcacctgaaaccgctcaggcagggacgttaccattgaaaatctagaaaatttcagtacaacactgtacattctagtatttttaaatgagaaattaaaaatttggagggttcatgtgcacccccaaagcacaatatagcttcgcccctgagagctgcagtagtttgcggctggggataactgtctgcctggccaagttcaacaccagccgactcctccttgc

SEQ ID NO: 50300 - DNA, 2361 bp, Oryza sativa
ttttttgcattggggccccttgcagccccaccagaggccggcaggggttttcctgcaaaaaaaccctccctcggtcaccgcctgttcctcccccgtttgccacgtcagcttgccgccccagaggtgagcggcagggtctacttttgtaatttttttggccgatagattatttctgtaaatattttttttaaaaaaatctaaaacccaaaaaaagtccgcagcgacatctatggcgagtgaggcggcccaagaggccagagcaagactgcttgtgggccacgtaggctgagatctagctggtctttctgctgtaatcgctcaggtccgttcgatgaaaaacgaacggtgcaacggtgttggacatccctctgactttagattaggatcctattcccgagaccgagcgcttgctccgggaacgcggcgatgatgtcccctccgacggagctccttgccgctactaccaccactcgctacaccactataaaaaagcaaaaagcgagatttagaaagagagatgccccttcaaatatatatatattttaaaaattattagcagagcaagtttaataatatagcccactactagctacaaatcatatatagctaatgtaactaaaagttcattaaacttcctacaaacgctctcagattgccacgtggtaatccttaaaacgctctcaagctgccacgtggcgttaataaaatccatcccttaatttttaattaaatatgtgggtccaatatttcttagccgtccaacttaattgagattaaaagaaccgccgccggaaccgctggctcagggccgcgcagagagaagctctagctcccctagggcatcgccatggtcatgatcctgcttctgctcctgctcggacgtccttgcctccgttcaactccaccattcaggatatgtggaagcgctgatgattaacttttggctattggattttgctattcacacgcctatgcacacgtataagtggtcgattcatgaatacaccgatggatttgcttgccggttagtaataaatacattccatctctaacctctgcttccctcctattttctatcttctttttatgtacagcggtatcagataaaaagttgtgataataaattttaaatagccataacttcaaaattatactctctctcagtcgtagaatatagcatcttttagctaagtatctagatatgtatatgtcctaaattcatagctaagagttggtatattttgagacggaggtagtacgtctcattttttttattcatcattgcatttacagctaaattgatagtttatgacccatattggcctgtattttaacttaaaattttcatattattattagtaaccacgtagaatactcctaagaattgctacataattcaaaattagtagactaagccatcggataaacattagtaaccttgaaaaataatttacatggtttttagttacatagattcttatccgcggagcatttctaagccaccatgtgataatcaaataaaatatgagagattcctacaaattttattaaaataaaataaaacatctagccatcaatttttatttaatttgataaacccattatttgcaaccaagcttaaagaaaaaaaaacccacatcccaaacggggggcgctgatacgcgataagccgcgcgcccccgcgcatgcgcggtcagtcggctgccctctagtctcttatgtatctactatacttatgtatatactacatatacacacgtatatacatatgtatataggtgtgtgtatatatatttacaaatatatttttaatacacatatacaaagtttatataggacgtatataaactttgtatacgatgtatacgaactttgtatacgattatacaaactttatatacatacatattaaaaaaaattaaaaaacaagaaattacatcacatatacaaagtttgcatatgggtttataaactttatatacgcgtatacaaagtctacatatgcgtatataaactttgtatacgtacgaatacaaactagcttggtatacatacgaatacaaattttgtattcgtgcatctttaaaaaaaccgaaaaaacagaagagaaactaaaaaaaaaagaaaaaccaaactgaacagaaacgaaaaaaacagaagaaaaggctaaccgaacagaaacgaaaaacacggaaaaaaacaaaaaaaaaaggaaaactcgcactccgcgcggcgcatccgccaccccctctgcgcgcgcgacacgtgtccagtcacgccgggaggggcgcgcgtgactgatcgcgtaatagccttctcgcgtcccaaaccccaccctggcctacacatggacacggatgt

SEQ ID NO: 50301 - DNA, 548 bp, Oryza sativa
gggactaaagatcctatctttagtcccggttggggttatcaaccgggactaaagatatcggggggcctgacaaggcctgacagatttagaaccgggactaaagatcatttttagtcccggttggtaacaccacccgagactaaagatcaaatatgcccgctgtagccaccaaccgggactaaagatcatctttagtcccggtttttagtggaaccgagactattgtggatttcgggcgaccgaccaaagatggtttctccaccagtgttttatcgtcctacgcaacttcacaacaattaaattagttctatgataataatgaatgtaaaatagacctaactgtaagtgatgttccaaaaagaaacttccctcattctgaaattatgataagtcaaaataacattattaggttagtcataaactactattattcatagtttagtatctactacgaatataccgtaggaaacgaccagtaaagaaggatacatcttaatcaaacattaaaactctcattctattttcagctaataaagtactagtaacta

SEQ ID NO: 50302 - DNA, 743 bp, Oryza sativa
aaactttagatgtatagaaatactatatataaaaaaatatttgaatttaaaattaaatttgaatcggatatataaacttttgatttataaactttgagtctctaaactttagatgtgtaaaattgaggtgtacaaactttaggcgcataaatttactaaaataaaaaagtaataccgtgacaaaaaaaagaaaccagttagagggagggagaatctgcgagcgatcgctaggtagcatttccgggtagcaacgggtttcacgatgaattggttctacgatggctaagacattttatatattatggacataaatataaatgaggacatcaaaaggggagatgaaaggaaaagtcacgcaaaaaatttaattgatgaatatgtgtaacggttcattttattggtagggtaattaaggcataaacttgattaagataaatgttaggaaggccaaggaatgccattacctccatacaaagtttaattagcacaaggccggctaaaattattttattgcaaacttaatagattggtatatatctgctactgtgtatgtcgaggtggacgataatgatgaattaattgggagaggtttaattaggtggagattggagatctagaacagatacaatagcagcctataagccagctgaaatgtattttaaaaagataaatgagaagagagaagaggagcgggctacagatttgtagccagctataacacggactttaagacacagtgtgtg

SEQ ID NO: 50303 - DNA, 2827 bp, Oryza sativa
ctcatggattggatgctttttttgcttttggacgctgcggcggcagctgctactatcatactatggtagctagagtgcgtgcttttggagggagaatctgggcaaagagtgagaggaggaggaagatggatggcggctttcttggcctggaagctcacgatcgctttggtgctcgatcgatggcgcagaatctgatctgcttgcttgctttttttctttcgagtatgtgtgcaggtgatgccggtgtgatctgaattgtcgccgactcgtcgtcttgctgctgctgccgctgcttcttcttcccgccttttttcacctgcgttcccaacagaggcggttaaataacttccaccaaccgcgcgcggcgccggaaaggaaaaaaagaagagattttacacgtgtcatctctcatctgtcctgtgttgtatccttctcggaggattttgatagtattttccttagaagttctaacttttctgttaaatcaaatgtttgaacgtatacataaaacataaaatatgaaaaaaaaaaccaattatacagtttacatgtaaagtgcgtgacgaatcttttgagactaattacatcatgatttgataatgtggtaataacggattaattagtcttaatatatttgtctcgcagtttacaggtagaatttataatttattttgctattagtttacatttaatacttgaaatatgtgttcgtatactttaattttttttaaatggaactaacacggcccttgtgctttgctgcacgctgcacggggaatgcccgaccttttcaggttctcgcctctttggggtaaacgtatctgtttcttccaagagagttaagagtatatatatatatgagtatatatatatatatactactatgccccgttccctaattttttttccaaaaacatcacatcgaatctttggacacatgtataaagcattaaatatagataaatgaaaaaactaattgcacagttagggaaaaataacgagacgaatcttttgagcctaattagtctatgattagccataagtgctacagtaacctagtgctaatgccagattaattaggctcaaaagattcatctcgtggtttctatgcgagttatgaaattatttttttcattcgtgtccgaaaagtccttccgacatccgatcaaacatccgatgtgatatctaaaaattttctttccgcgaactaaacagaccctgtgtacacagtacacgttgcaggggtgcagagttctctgcttttcttgtagattcagtgagatctatgcgtcgtctttgggcaggattaccgattacacatttacacccaatcgtcaaatggccacgtgcaccaaactagaagaagtagaagaagaactctgtttcttttgctcaaaattgcgcaacatcctcaagatgttgttcgacgagacgacggcgagcttaaatcacgagatagctgagtatctccagttctccacgtcgcagagcaaaattagacccatccccaacaaaacacgtgcgtatcatccaggtatacacggtgtatacttagcgtggcactcaggctatctatgtggaatgtggtgccctgttcggtactccacgtggcttgcttatactggtgccacgtaagcactgaatgagaaaggcgttattttttttcctgattcctacttatgcattttctttctttcaaaataaaatcactttgcttatttcatttcccgcatataattccctaatattttagccttttttaagtcgttggttaaattttactcttatcccgattgttcacatttgttccgtcttaatgaatatcttcctacattcgccccgagatctagacaagaaattattgagcacatgagccactggcccaccgcccaagatctttctacgggtagtctaaccaccacctcacatgtgttcctctaccctctattctccagtggtttcgcccttaaccattctatcatagtcatagttatttttttcttctcaaatatttccatgtgggcacaccgtgtgcttctgctcctcggttgcttgtcgtctcctgatacatttatactttgtttctttttcctctttccctctgtcacttttgtctcgaatgcctcatgatcatttagaccttacaacccttattgtcactaacgtgcatagaggttttaatagccttaccattattgtcttgccacctttgtcactcatgcctaggctacctttatcccaacctccttaaggatactaatgatgtcaactatgttgactaatttctctttttattacttaaaagtgtagtcattcatcttccccttccctccctcacttcgtgtgcagtgcatactgcatactctcgcataaaaaatagaaaattccccagataaatagttgttagttaaaaaaattcccattctttaggctagatccattcccagtgatatagccaaaagtatcagaatttaggtattgctaaaactatagaagacaaaagatgaagcatagtcaaccctacatacaacgaatcaaaatgttaagggttcgacccattttctcgaagaaaccttggaatgaaccgcaatgtcgattgcttagctcattttctctagaaaatcttttttttttgaaaaagaaaagttgcctatccatttctactcattgaaacgggggaaaatatgtagtgcaaaccatatatacagtggaaactaccgttgaatcgaaaaatagacgtccgagattcgtccacgtcaccatgagttaaaatttaactcgcagattcactcatgagttaaaattttactaggaggggctgcaggaa

SEQ ID NO: 50304 - DNA, 1507 bp, Oryza sativa
tcggacgtccatttctcgatccaacggtagtttccaagttttcactacatatgtggtttgcactacatatttttccttgaaacggcttacataaagttcttaaaacccagaaaatcacatgatgtacagtgatgatacacaatggttctcaactttttctttttctgttccaaactaggctagcccacgacggtcaacgtaatgcacaatacccggagatgctcgatcgtctaggaagggaggcatacgtatcctggtgtcgatcttgagattgctacgaccgctggtggtgaaaggcagaatttattctatctgcgtcacaaaagtcacaggccagctatgccgacggcgtcctcctcctcatgctcctgtagagtcatagaatgattagattggatagattgtgggcgagtaaggcctgtttaagtttccaaaaacttttttcaaaaacatcacattaaatctttgacacatatataaagcattaaatatagataaaaaaaattaattgcatagtttgcatgtaaatcgcgaaacgaatcttttgagcctaattaggccatgattagccattagtactacagtaacatatgtgctaatgctggattaattaggctcaaaagattcatctcgcggtttccaggtgagttatgaaattagttttttcattcgtgtccgaaaaccccttccaacatccggtcaaacgtccgatgtgatacccaaaaattttcatttcaccaactaaacaggccctaaaacagtactctagaacggagatgatgatatctactactccctccgtcccataatataagagattttaacattttgcttttattgtttgatcactcgtcttattaaaaaaatttgtgtaaatataaaaaaataaaaaattgtgcttaaagtactttagataataaagaaagtcacaaataaaattaataataattccaaatattttttggaataagatgaatggtcaaatagtgtgtcggagaatgaactcctccaccagggaaccgtgaggcccccctttgtgagttcggccggggcagcgggtgagattcgaggatttggtgagcgaaactgtgtggtcttgagggggttagccccctccaagacgatcagatcaaagaggtttatacaagttcgggccgctatgaagcgtaataccctactcctgtacatgattgattgaatgtagaacacaagtgcttgaggttgtgagacccaagcgccagttcgccccctcgtcccccctccaccactaggcctggacctccttttatacctcaaggggttaccacatgggcccaacaacctaacctagctctggtggagaagtattataatctttgcattaaatgcatgtcttgtctcttgacttgggaagccaagcacgcgtcgtcttgatgatggggcctgtcaaatcttgccgcctgacacggggggtgcccctgtcagtcaccatttaatggataaagacttctgggctcctattaaccgg

SEQ ID NO: 50305 - DNA, 2456 bp, Oryza sativa
cacccatgtatactgctataggaccttgtgtgcacggtttacgtaagtttagaggtacacatttctgattttatggataaaagaccttaaaaaatctcgctgttaagctgaggtaccatcggtgaacttattccttatctcttgtacagtttctacgaagcaagcatgacaactgacaaagatgcaaaattgaactgaccttcgcttgtttgggcatacaggccgtgtttagattcaaatttttttcttcaaactttcaacttttccgtcacattaaatatttggatacatgcatggagcattaaatatggacgaaaaaaaaccaattacacaatttgcatgtaaatcgcgaaacaaatcttttgagcctaattacgctatgatttgacaatgtgatgctacaataaacatttactaatgacagattaattgggcttaatagattcgtctcgcagtttacaggcggaatctataattagttttattattagtttacgtttaatacttcaaatgtgtgtccgtacacttaaaaaaaaattgtcacacgaactaaacacaaccaaagaatccaaaagtatttcactagttcatgcgccaagaggcaagaggactagtgtgttgtaccatgaaaacaatatcataactttccatcccaagaattttttttagcagaactagaatctcacttcagatcaaacaacagcagcagcagcagaggcagcaagatagtagaaatgaaaagggaaatgcaggctattttgttactccttcgagcaaagctggtcaaacaacaatgataaatgccgaccctaaactacatatatagccactctcacttgttagcaacctctcctagattctacccctaccacagtccacagtgcattccaacccctaaagcatgttataacaagagaaaacttaacatatcaagcagaaaacttgagatgtttttagcatagatgaaccagctgttatatatagttaccacttaccaacaaaaaaagaacatgttaaaaatcccaggaaacttttcatgattctagctgcccaatgcccactatgccttttcgtcttaggttcatatttttgttagcaacgcttctttaagtgttataggatgaacaatctattaaacggtacgtcaaaggcaatagtatttctaggaaaaaatcgcttgtacaataacatttcatggaactcgtacttgtcgatgatattttttaaattggacacttataaatggtatttcttgaattttctctccacaaaagcaacttcgctgagattgatcatgatgcctaggtgctgccaaaccaattgaatggtaggcaggaagaccaaaaggatatgctttattggacaaagatggtggaaatgaaactaacagacagacactttatttctcaatgaccgtgcacctctttttattttttcttatgcaaactatgcacatcaattagtaggatcatcatggattattgtgatcagaggctacatcagtacagtacatcaccacctaatgttttgaatccttattgggagtaggttgcatagttggaattgtctgtacctagggacaggtaaatagcaaggtcagtactaaaagacacctaattcctaaccacaacagaaggagagcacatcctcactttcactgacaggtggcgctcatgaccacacatcttttgacaaaacatggtctatataactgccttttattgctaaaattatctctgttcaccctaaagattggcctaccttgtcttataaacctggcactagcctactaggtgtaaagcagatcagataaaaatcgattaccactcatgagtcatttgccaagacctgaagaccctacctaactaattccacattatactctgtaatctgcacatgtactcttgtagtaatcgacacataatctaagcctgcatctgacacatgttgcaaatttctgactaagaaatgctctgcatatgcattttgctagcaaggtggatgaccatgaacaacattcagacaaacactagagcattttcgggtaaacagcactagcttatgtcagtaggaaagtttcctgtgtgcatcagctcacaaggtcacaaggatggttagcaggtcaggacttcatacaaataactcaactagccaactaggcataaaggaaatattagaagtaatgaatgatccatgtgttctatagagccaatatcttactatcagatgacagcactttaactattgttaaaactatcatgcaagacaaaccgccaggagttggtacttctactcagaagcaattggccatcatacaccaaaaaattaacgataaagaaataatgtaatccaaaaggttgactttgactcatcatatactaagtcatccatgcaatcacaatcatttatatgacaatccaaacatatccaaagtcatccatgaaaaatcgcgtaca

SEQ ID NO: 50306 - DNA, 584 bp, Oryza sativa
cagcagcaccatcaagccgatggcaaatcattttccatgcatgcgatgtgaagattccaatttggttagaggaacaaaaagaaactaggagagattacagagagagagaaggagaaaaaatatatattagtgattattgcaagtaacaataaagaaaagaggccaccgacgggcaggacagtggcagcccaaccgccattattgggacaagaacggtttacctgacagtgtgcttattgcaaagcacaagtcagcacatctcatttgttcttgttaactttggagtgacaggctccctataatctggtctgattttttttcctcttaatgcatgcttaattaatctacatctggcatcacaaattaattatgttcagtttgtgaatctttgaggtgcaatgatgaaaacaaaggggagttcagtagctatctatatgggatgtggagtaaagagagccagggacttttattttagtgattttatatattagttgctgtaaatttaaataaaaattgcatagcatgtactatacgcttatggtgtaaataagtaaaaagaactacaatcttgttgtttgttataa

SEQ ID NO: 50307 - DNA, 2059 bp, Oryza sativa
cacgccatgccattgcagccgcagctcagctcagctagcgccggtcgccgtcgtacagtttgcccggtaaagggtcatgggacgccatgaagtgtgcccatctgcctccctgtcctccctctcctttcatcttctccaaggcttcaagctcaatgtccccagcttagccaatcatgcatgcatgcgtgttagttgttagtttacataggagtactacacttgcacgttgatgaaaaaaaaagctttttctaagagtatatatcatatgaatgtccattgtttgcaagaaagtaacgaaaggagagacagagacagggacaaacagatagtacaaggtcgagcggctatggacgttgtggttaaatagaccattagcatatgcatgtgtgccactgtgcagctagttaattatccaaaacggcacccaacgggtgtacgatgtgcacgattggccaagctattagcatagcatggagtacaggataacaggaacccgtcgatcaaggtcaaggcgagattattgacgccatataaattttaatcaccgtagggcgataggccaattgtcagctacagtattaacgtagttaattacctcctctctccaccagccgttgcacaattgcatgacctgacgacggagcaccttaattattccttggctaatttacaagctcacaagcagagtttgattccgatttctgacctcttaatagtctttttggaatttctgctatgacgttcggggttaataccggagacaatattattacttatttgggaaaatccagaaaaataccatcgacaagctttccaatccaaagaaatacattttttttgcgaacgccaatccaaagaaatatcatcgacaaatttaacttcttagaaattaatgtcattgtacaaatgtctttatcccataaataccatcgctgttaggtttccgttagcaatcatttgttgagtgctataaaaagatcattttacccctacgaattgctaaaagatgattaaaaattttgctcttttcataagcttagactaatttctaggtcgttatttgcactaaactgttgttagttgactcgaagagcaaatgttttgatgagttttcaacaattcgtacgggtaaaatggtctttttacagtacttaacgaggatctactaatagagacctaacggcgatagtacttttgggacaaatgcgtttgtatgatagcatttccatgaagttggatttgtcaatgatattttttgaaccgtgaggcttgttgatgatatttcttgaattataacaaaatttcattataccgattacgaaccccaagacgaggctaactagacctgaagttcatataattaagtatataacacctgacaagttatgatcaaactactaagtccagagttttatctagggagcacacgcagtacgtgtgcgttggcacatggatgcaggcatgcagccgcttaattagctaggtacagtactgttcttgatggcatcttaagaatccataacctcacaacgcaacatttcaacccctgcaattactcaatcaacagttgctcccccattgaataagctgctcctgccttgccccgttgagaggaggcatgtgcagggcacatggttgatcagtatagtgcactgtcaaggaagcatcctttggaacggagacctgtcactgtcttcttgtcaagtccaaagtttctgcagcgccagtgagagagatttgctatacatccatcatccatgtgagggaatacatgaaagtgtaacgctgaagagaaaaaaaaaacttaattaacacgttacattcaaacatgcatagcgtagtgataaagaagccggcaataattgttcttggagagactgttcaagagaataaacacacacatcagtgtttacccaagaacaatgatgcgtccactggtggagaaaccatctttcgtcggtcggccgatttccacaatagtcccggatgcaataaaaaccggggctaaagatgatctttagtccgggttcaaaaaggtaacgggcatatttgatcttta

SEQ ID NO: 50308 - DNA, 733 bp, Oryza sativa
ctgttgcataggcccaaccattctgaacaaccatcccggctgcacagttctatctccaaaccaggaatataccattccaaaccaggagctaatcaaattattaccagttatagcatcttttattatggtgagaagtgtgaaactaatcacgaaagacattgttagacccgttcataactgcgggcatggctattcgaatagttttactctggccagaggtataccactgtacccacaagatacagccccacaacatgtcaccatgcgcctcaataccaccacggtacctcagaaaggggctgtgacagtacccctcgcacaacacaatccaccacagcgcaccattcctggatcataatcacccccttataaacaaggcatggactccccagcgacccccgtgggcttatctctgccacttctcagtctggtgccccgcaatgaaccatgttatacaaaaggtaaagccgttgcccacgctggcttgtggttggcacggttaatgtttcacaaccgaaactcgtgaaccagtccttaattgtcatgagcacgaccatcaaaaccatgtgctcacaacccaccattatcaagttttagttgacaaattaattaattaaccaatcacgattaactatcatgagctatcattaagccatcattaaacaatagtgagtcataagttatcccaatagtgtgctaatgtttctaagcatggctaagcaatcgtatctaa

SEQ ID NO: 50309 - DNA, 849 bp, Oryza sativa
tgtcatgcccggaatttctatccaaaattccaaacgcttacatgtgtgtgaaccctcgtccaggaatcagccgagggacacaataacaaattgataatagagtacaattattactctaattaagaagcgaataaaaagtcattacagaggtagatagttcctctcaatcaataaagatctaagcagcggaaaataaaataaacggcgcagacggctccactccacaagcagcttgaccaaggctacacctaatcctccacaccatcagcatcattgtagaactcttcctctgatgaatgattgcaaggtgagtatatgacatactcagcaagccacgcagcaaatatgcaagtgctcaagataacaaaggatggcataataggttttcatttgcaaaagtagcatttagcaaacatttgagaatttaataaaaccgttgagtaataattaaacaatattaatccaacactatacaacgtaccctgttgtataggcccaaccattctgaacaaccaaacccagctgtacagatctatcttcaaaccaggaatatatcattccaaaccaggagctaatcaaattattaccagttatagcatcttctaatatggtgagaagggtgagactaatcacgaaagacattgtaggacccgcccataaccgcgggcacggctattcgaatagttttactctgatcagaggtgtaccactgtacccacaagacacaaccccacatcatgtcaccatgtgcctcaataccaccacggtacctcggaaaagagttctgacattacctctcgtacaacacaatccaacacagtgcaccactcccggatcatagtcaccccc

SEQ ID NO: 50310 - DNA, 3814 bp, Oryza sativa
caccccctaacagttccatcatggttccttctatcaaagtactccgtatcaactattgtgttgttctgaaatttgagcaaagagctagctatagataagcacctaatccaatgcaaatcctattaataaagtcaaatagatcacaataaactaatcacttatcaaaaagaaattctcattaacacttcctatgcttctgttgatcagtaaattgctgcgcttgctaatgctccttgttacccaaaaaaaatgccgacttcgccagcatagcagagcaagcattccactgcttcaggctgaggaacacgagcggctgcctgtgctggccggatcctagatccgcccctgcgtctgccacaatacatctggttgcgttgacatgtgacatatacatacggttatacctaggggtgaaaacggtcacagaaattcccgatcaaccaggcgccgtttccgtttaaggggtaccgtttctgaccgtaccggttttggctatttttaaattttgttttttctaatttctttccgcatcgtattaatgtcgatactgagtagtttaagggtccctttgaatcgcggaattgggaaaacataggaataggaaaaacgtaggattttgataggaatgtaagtgtaaaacaaaggttgcaaaacgtaggaaaaacacagaaatgccgtttgattgaaccacaggaaaaacacaggaattggatgagagatatagactcaaaggaaagttagcaagaggttgaagctcttgttaaatttcctccaaaatctctatatgattgtccattccataggaatttcaaaggattagataggattcaatcctttgtttcaaagggcttcataggaaattttcctatagaattgaaatcctctaaaattcctatgttttttctccaaatcaaaggggccctaaatgataagggaccctttgaatcgcaggattgaaaaaacataggaataggaaaaatgtaggaattgaatgccatacttattggattcctatgggattttgaagcacaggaaagtcttcaaactgtcgtttgattagcacacaggaaaaacgcaggaatcttagacacatgaagaggaaaacatgaggtgagacctcatgcttattttcctccaaaattgctctagtaagattcattccataggaatttcaaagtaattgataggaaacaatcctttgtttcaaaggactctataagattatttcccataggataaaatactctagaattcctatggtttttcctttgattcaaagggagcctaaatatagtcaattaccgaccaatcgagcatcgtttccgaagatatgataccgtttccgatcattttcacccctagtgataccactgtgtacagtaccgctgtgcacggcttcgtggcttcagctatggctgcggcaaatcgaatcgagcatgtggatggattggactgcagtgtacgtactactgtacaggtgtacaggagcagtactggactagttgctccgatgcctactacagtactactactacaagtagcaacaggagtaattaccgcctaaacttctcggacgacggactctcggcacacggcagggtccacgcccgtcctgctgtccaaggagaataaaaaagctgtgcaagttcgatcgtttcagtggggctcgcactgggatcgctcatcgctcttccacaatgtaggagaacgacccgtcctgggcccgtgcggccgtgtcgccgctggctcctcccgtcgagtggcgcgcgagattgcagcgcggtgctggagcaccgaccacccagtcggtcaaaattagctcttgggatgtagctaacagtttgtgcgcgcgcgaccctgcgacgaagatacggagagaaaaaagagaggacaaggcccatttgaatcaaaagaattatgaagtaatttcataggattgaaatcttataaaaatttttcctatgtagccctttgatttaaaggattgaagttttccaaatcttacaaaattcctatggaatgacttgttgcatataggttttggaggaaacttagcaagaggtccaacctcttggtaaaaatcctttgagtttatctctctcatccgattcctgtgtttttcctatgttccaatcaaacgattattcatgtgttttcctatattttacaatcctctgttttatacttacatttctgctagaatcctatattttttctattcctccgttttttcaatcctacgattcaaaggggccctaaaactggcgtatccggcagaaattttactcaagcagcacacttagcctcaaaaatatatttaattctttttggaaagggtgatatatatgcagcatggttttccacaattgtggcgagtgatgacaaaatatagttctacgatgaatggtcaactctcagggaagtagaattgcacacatttttttttacaatatgcaggaaacgttttttttcgttgtagtcggtttcatttgaaatagtgcgtaatattatattcttggcgttgtaattagtatcttttttttaaaaaaaatgcaactagtgggcatacttcataccgtgcaatgaaacatttttgagtaagtaaaggaacactgctcaatatttttctagggctcgaaagttcgacccctagttgcatcgttttggagataagggatgaaagatctggagatttatttattggtagatgatacctgcgcggacatatatctatttaagtaaaatcaatgctagtgaagcttgtctaatacaaagttgtttttttaaagagattttttaatagaaaatttatattggttgaaaccaccttgagatacaattcatttaggtgcatgttgttatctatatagggttactctatgttgggctctgtgtatctaaggtttaaagaacaattaggtttgtaaaattatactgtattcatattgatggtagtaaaaggtatacttttttttttcagcataaagatattttcttacacatctaattttagaacgaaaagcaattaactgacgaatcttatcgattttgacacatattgcgaacaatattatcaaagacgatccatgaaaatgtagtgtctaacagagatctatcacaggaaaacaaaaaggcttcgtacaaaaatccacactcctcaggcaacacatcaaatggtattagcttgagacggatgagtacaatccttgtaccaacagacatcattacaaatccaaacttaaacatcaacagtatcacagaagatgggtcgttcgagagacgaaggttacggctacactgctgcgttgtgtttgtggcgctattcgttccaagcagccgagcagcccagataacacgaacattgaaaagttaggtggcggtgaaggagggacggctcgccgctcgccggcgttgccgttgaaactcggacaccaaatgccaacattgaaccaccagatctgtcatctgtgcaagtgtaagagagccagaggagagagcagttggcggttaaaaccaaggcaggacgaggctgaccacccccccagccccacccgcagtttgttggcccccacgctttccccacccacgagggcaaagagaggcaagccaaaggcggtgcgaatgcgatgcgtgccctggtcagctgccacggcgacgggcatcaccacctggcccccatccatccatcccgtccaattcatcgccaccgcatcacgcgcacggcgcggcacacacacacacagcacacacacacaaccgcagcgcagcgccgcgccggtataaatcccgcggacccaaccccggatagggacgg

SEQ ID NO: 50311 - DNA, 1060 bp, Oryza sativa
agggggagggacgctggcggcggcgatggcgagggcggcgccggggcggcggcgatcccggcgggggcggtggcgcgcgcggaggaggcggcgggcgaggtggtgcggcgggtgcggcccacggaggcatccgagcggcgccgcgcggcggtcgtcgggtacgcgcggaggctcgtcggcaccgcgctcggctgcgaggtgagtgcccgggcggttcgcggcggggcgcgcccttctgcccccgtttccactccaatttcgggtttttgaggtttctcgggattctcatcctcgtttgattggggcgttttattcttcatttttttttgtttagtgtttactctgcttccgtcgctgtctgtgggatttgacgggaattctctccacgggaggattatcctttttaattaatcggcttaggttcgtacggatcaagactgattcctaaactatttgctcgcggcgcgtcgttgcaattctgccttgttttattttcgctgaccttcacgggggaacaaaatcgggatcatttttttatttcacattttttaattactaataataaactactattaactagccctcgtgaatccaaactgctgaattccgaactttagctgaggccaccgtgcgctcggatctatggccttttcgctttttggtttaataaagggttttctttttctgatggaacgtttcttgacgcgttcaagtatttattttctgttggcacaataatgttttatgttcgcttgcaagcatcacttccagttccaacgaaaaggcacgaattgctttataaaatccaactttctacatcctaaaagttcctttcaggcggaaacaactttcttctgctggtccagaagagagacaaaaagaaaaagaaaaaaaaactcctttttcttgttttggttctgtttctgctcgtgatgatcttgactgcctgccaggagaagcagtacccttcacggttcactctgtccatggtgactcatgcatccacgtggatttatccaatagtgtggcaactgatcaatgctgtagctgaatcttctgg

SEQ ID NO: 50312 - DNA, 791 bp, Oryza sativa
agtaggttttcaaccctattttatttttttggttgctatgatggtttgcattgaacatacacttaaactttataggggctgatcggaaacactagctgctgcagcgctgcggctgtggtcgtgtttagctgttgcggcttgcagccgtttttcagctgtcgcagcagcaagcagtatcgaacacacctataaaaagtaatgtttcgctgtaattctctttatctctaatatttcgtatgcagggacggatccatgaaatgaacagagaggggctcctcctcttcttcctcctcctcctcttcttcctcctcccatctcccattctctcaattgtgatccagtgggttaggaaaaacttgagtcccccagcaccctcactggatacatcgctttttatatattacatgagtgtaccaactcttgtttgtatattatattagtgtaccaactcttgttatgaattatgacgacagattgcatgccattggctcatgagtagagcattattggttcagtagcagcagtttgtgcacccgtaacatctagttggatccaaatggagccacacttagccggttagcccacacatcttattgcagaatgcagagttgttgattagatctttttttaaaaaaaagcttttgataccagatgaggtgtgataaggaaacaaaccaacctgatgcttgctcggacatcactaagacaccaacccttatctagctaactcgtctgccatttgcatcatcgtatatatatgagtgagcatcactgaatcttaacatgaaaat

SEQ ID NO: 50313 - DNA, 1066 bp, Oryza sativa
tcagggacgttcggtgtactttttcctttttagaaaggattgggagtttagaggatgaggctattaactactttgtttggttgggatgcataggaattttggtaggatggggatgagtaattgaggaaggaactccctccttttcaatatctgggtagggggtgataattgggagggaatttctcctttactttgcctaaacaaatctcagccatccgtttattaatggcttaatctctaactaaactccctatcaatttccaccacctctactaaacaggatattgggattaaaattcaaattcccatcttagtctcaccatcaattccctcgtgtaaactcccaatccccttccctcgagttgccaaacaagctgtatgggcttttccgcgtggatatagtagagaaataagttcaccagaggtctcttaacttaacagcgagatttttagaggtccctaaaccacaaaaccaaatatgtgtacccctaaactcacacaaactgttcaaaagaggtcccatggcagtatatgtgggtggttaaactgacgtggcatcctagttagcaaatttttttaaagtatgtgggacccacatgtcagttaacatcgttttttcttttcttttcttctccttctcttctctttctcttcttcttcactaagtgagcacgatgggcgggcggcgggcgagcgcggctgccgagtggcggcgggcatcggcaggcgagcgtggcctgcgggcgagcgggcgagcacgacggcgggcgagcagaggagcgcgacggctggtcagcgcggcagccgagcagcggcgggcggcggcaggcaagcgcggctggcgggcaaagcggcgatgggcgggcggcgggcgagggcagcagcgggtagagcggatgagcacgacggcgggcaagcggacgagcacgacagcaggcgagcgaacgagccgacggtgggtagaacggatggcgccccatgccccatggcgtggtggtggagatatcggccgatccggagtccaggaacacggagagcgtgtaggactcgtcgatggcggggccga

SEQ ID NO: 50314 - DNA, 1958 bp, Oryza sativa
tatacatgatggtctgtaaattaaataccatggaaatagagcaatttccatatttgtctctgatggagccccactaacatgtagtaggcctgtactgttggcacttagctagataccattgtagtaagaataaataagaggcaaatgaagaaaccagtaaactttaggggagaaaaggaaatttatatgatgaaaattaataaccatgcatgcaccataacttgctaatttgcttgttctttgtttgttttttccagggtaacaacttaaacatggccttaattagtgaacaactgctctcggtcatatgcacgtacgtagacaagcatgtacatataacaataatactagttaagcatgaaaagccaacatggaactcctacatatatgaaaaattcaaatgggtactcaagacagatctggaatggtcgaaatatatgctggttttgtttgcgacatacatgaacttattgtgttccttgaatcctcctcatatattctaagacaggggcaaatatctttcacacaagtagctactcctagctagtagagaactagagatagctagctagcggttcccaccaattattgcaagcacaaacacaaatcaaggtgaaagacgaagaatgccaaatgcaacttgcaagaaagagatgcgcgtggcttgtcgtaatatagttttttgttacagcaaatatctgtccttactaattaagtccaaacatgtacgtacgcagctatatatatataggagtagatcatactatgtatcgatcagtacatatacaattattattattattattattattattattattattattattattattattattattattattattattattattattattattattattattattattattttcagcttgctggacgtaagtatatatatgaatcggagtatatatattctgttcttgcaatctagctacctagctagctacctccatttcagaaggtaagatgttttggttttatctcaagtcggacttctataagtttaatcaaagaaaatgtaataacatctatgatgtcaaatgaattttattaagagattgttcactttgtttcatttttaatgttaccaagttttcgtattgctaaattttagaagggcaacaaactaaacacattcttgccattgctactataccaaattttgaaaaaaaacggaagcttccactcaaaaaaaaaactttaccaaaatttagtcacactaaaacatccaaaatttgataatgacaaatattggtagggttgaaaatggtaacaaagtgaactaaatccaccattgaatatattaatactcctatatttgcttggtgttaaaaatattgctatgtttgtttttttaaaaaaaaattgatcaatcttatagaaggttaatttatagcaaaatatagccatcgtcttacattcttaaatggagggagctaggtgttttgatttaaagaaaaagattattctcgaaagcaattaatattccttttaggtattcaactagggaatggagcaattaatttcttgcacaacatatgtattactattagagtacacgacgctgatgtaatggatcaacactagcgtcttaattatatggggaaaaatacgtaaattaaaccatggaaggataattaaaccatggatgacgcctacggtaccgctcaggcatggcaacagaaatacagaacaaacaatatttaatatgcagcttatagctatcacacaagtcgagcaagcacgcacgcatggcacgatatggatcgagacgccgtcacgtgggtcaccatggggcatgcatgcaatgcatgatcagtttgtgacgaagactgacggtcactactacaaaagtgatttttctatacgagaccccatgatttttgcaaacggaccataactagtggcgcctgcaaaaatcacgcggcattttc

SEQ ID NO: 50315 - DNA, 1058 bp, Oryza sativa
tatataacatatcgttagcaatttaaaaacgtactaacgaaaaacgtggagtagctaagctcaattagctctttagagtatgccctaacggcctgtttggttggtgggagtttttttttgagggattggaagtttagagggatgaggctattaggtgttttgtttagttgggagatatgggaattttggtgggatgaggatggggaattgaggaaggaactccctccttttcaatacctaggtaggggcaggtaattgggagggaattactcctttactttgtctaattaaatctcagccatccgattttattaatggcctaatctccaactaaactccctatcaatttccatcacctctaccaaacaagatattaggattaaaatcaaattcccatcttaatctcatcatcaattcctttgtgtaaactcccaatctccttccctcgagttaccgaacaagccgtaagatgcctagcctcatgttttttttttgccacaacattccttacgaattcgggtggatcaaataattattgtaatatccccgtacaaaaaataattcctgtaatatactctctccgtcctagagtatgagggattttgcttattgttcatatttatattcacctaaaatctcttatattttgggacgaaagtaattaagttccaacgacatgatatatcgttctttttaaagtcatgaatttcaaatgagcctttatttttctttgtcaatcggaggagacgatcgatgctacattgtcatatgcgcagttgcacaaacatcaattcttttatacctacctgtcgctaatcgcgtctcgatcgcttcggctaattaaaattaactatggtgtgatggtgcttattgccatggatggcacaagacaatcattgtatgtcagcttagtgttagctctactctagtgttctgaactctgaagaaagggagatgaggagacaaggaagcttttggctgatctgatcatgatgctctgctgccgttccttgccggaaagccacaccgctttattaggtgttgggtcttgcttaagg

SEQ ID NO: 50316 - DNA, 771 bp, Oryza sativa
tgcagcccctgtttggcttttgattagcaggctattgagcctatatacaaaggaaggaagttcgtcgcttctcttatcttaataaagagtaatcatgacagtactatttgtgctataaatttatctttttttttatttctcaatgtgtagattgagtttgaaattgatttttggtgaagtgatagatttctactttgttaaaaaaatagattttttttcatgaccatttgtattgaatttaaaagaaaaatgtagactaggagacatccggtcgagggatggttacactcccatgaaattggaattcaatcatgtaagaggaagttgtttggttggtggtaggaattaagctgattggtatttgaaaccctaccatagaagaactatacagttgtaagcatcaattatttaacgtattaatcacccatgaaattggaatccaatcatgtaaaaggaagtttttttttttagaagatgtaaaaggaagttgtttggttggctgtaggaattaagctgattggtattttaaaccctactatagaagaactatacagttataataagcatcaattatttaggatcaaacatcttaatcaccccttctttgcctgctgtaagactatttaagagttcctttagtccttgaagagatataacatctttcagcgataatttgtagagccataaaagtgctcctaatttaagctaggaagtgatatcggcttatagtgattgtccaaaagaatatcacgctttaaaggacgtttatac

SEQ ID NO: 50317 - DNA, 2842 bp, Oryza sativa
aagataaagtactatttgttagaattttgtctttttttggttagggctaaaatatagtaatatatttgaagatgagacttaaaacatatatgcaataccattgaaagtacatgcatatttttttaagaaaaataatatcatatttgctagttggtatgtacgaagtatgcacatgattcgttccctatttggacatatgtttctacaagattgagcagttctcaaaaatcttgcgaagtttatgctccaatcagcctagagtgtaactcagacacggagagtagcacaaaaagaaaagtagaaacatattttttttaccagtttttatatgaatatacacatttagaaggaatttgcaaaagtatatcattgtcgcgaaatgatgatgcaaattcacagcgagtttatacgggaagtacgcaaactggtgacgtgtacgagatgtcaacgctgtgttcggcatttggtgttgggagctaatcccttctgcacgtaaatcggagtgactcaataatgcattatcaattaagtattagctatttttttaaaaaaatggtttaatataattttttaaagaaactttcatatagaaaatgtttacaatataacacgtcgtttagcaatttaaaaatcgtgcacgtaaaaaaataggaaggaaagtgagttgggaaagtaaggggaagaacacagcattagtagcgaacggcgattgcatctcctcccttctctctcctttgccttttgcattttaggtcccagctcgggcttcaacgtctgcgacgccatccctctccccttgatatccccgaagaacgtgtgaccagtttttgctccgcgttcttcacaacaccacacgcaaggaggatgtggcagcgaatctttgacatggatagcccaggctgaatgccaactgtatgcattgtgaacgcccttatttggccattcacaacgcgcacacgctaggtgtggtgatgttggccacgtagacaactcgcttacgtgaagaagacaggggagtggtttcttcaccggatctgcatgaccaaagttggttactagaaccttgcagcagtttggtaaaaaaatgtgcttatctggggatggagagagagagagagatagagatggaagaacagtgtcagacagaaaagaaaagctcaatttgagccggagtagagacgctcggggaggtcgccgctgttgcgtgggctcggggaagccaccgctgtcgttgcgtggattcggggtattgaggcaagaagctggaaaaggaagggaaaagccctgcttccgccgccgccgtgttttctcctaaacagcgccaacggtggtgtgtgtgtgtgtgtgttaggggggggaggatgggggcaccaaatctgcatcgccggtgggagaggagagggtggaggagttggggaggtgtggcagattttgctccgaaggtgcaacattttttgtttttgtgctgggctagcgtgaaaaaaattggtggtgggccccatctaaagctacgcaccctggggagatgggagccccatttgctttttctatgtggacgcttaggctgcatggtgagacctaaaacatttctactatccttagggtgtgttcgccgttgctcgttcccaaccgggaagagtacgcacagaaaacagagcgatccattagcgcgtgattaattaaatgttagctttcttttttcaaaaataggttaatttgatttttttaagtaactttcgtatataaacttttttaaaaagcataccgtttagcagtttgaaaagcgtgcgcgcgaaaaacgagagagaagagttaggaagaggggcatccgaacacagccttaatgtacgactatgtatatttttacaaattctttccaaacatatatattcctataaaaccgatgaaaagaatatattttaaattttatttcagagtagcacgcggtaagaacaaggacagccactacgtttcaccatcgctaccagaatagactggcgaatggtacaggcattgcctttcggcagctgccaataggaccaaagaaggaagtcgaaaaggaaaggcgctccgatgagcagaggatgaactgccttttgatcagaaaagcacaatgtgtcagttcttgtcggaaggagaaatcagaaagtgatgttctcggtgtcaggtgatgtaatgtgagcagactgctctgctgtgtgcaggtatttaagttccagaattcagagctgaaacaaagaggagctgatccagtggtaatttgcacggccacacaatccattttgtcatggtactgcggccattgttccaaattggaccggggaagagagcaatctgaatattcagggcacaagataataatgggagaaaaaaaaaaggaaagctggccttagagagcactattcacacacttttgaccttcggaatacagaaatttcattcgagttaattcactttgcatagaaatcgacacaaaaagttctaacatccaagagaatgccaacatagcactattaaagaaaaagacgcatttaccaaaccataccttcctttggtagagacaaatgggattcaagcatcaagcaaagaacatcaaaatagagcaacaagagaatgcttaagattaagctaacatattcccccgattttttcttctttcaagttaaacttaaggtaaaagaactacaatggtataattagttgctacccattagccttcttggcctaactatagacaattgaggaggacaagagatcgacagaactttacatggacgaatatatatgctattagaatcctcgcatttgcgctctcctgaggttatgaaaaaagctcaacctg

SEQ ID NO: 50318 - DNA, 1448 bp, Oryza sativa
tcaggtgcctatttccacccccccccccccccaacacccgtgcctcctgccgccgtcgctcccaccccaccaccggcggtcctcttcctcccggtcgacgttgctagccgatgccccttctacctgacgaccctatggctgcagtctgtaccgtcccatattcttccagccaaggtggcacccatcctccgcgccgacgctgagccgtcctcggggaatgccggatctggcaccttgtcgccggattggccccggtctagggccggacgattgcaactcgctgtggctcaagttttgttgtcggctcttcctccttccgaaccgacggacgcattggttggatgacagcagacatcagcccatgattaagcgttgcgggcggcgacgacgaccttgctgtatctgtgtaagtgatgagttttatggagtctttattcttcagactactggaagtttctttttgtccaaccaggttcttgcgatgtactggaagttcctaaacctttttttttttcctgaacgtgttcctaagtacacttgaggctgttattttggtcgattgcaaagcaatttgaattaacaaatcccaaagcaaagcggtagtgacgagttttttatgtgcatgttttactgcctcggcggtgatgcaatcattcaggttttttattcgactgcatcttacctattcaaactgcaggaaagtattgaattattgtgggttctggtggtttttatgctgacttgttcagttgttctcggtggtggtcttttttttattattagaccactgtatgtgcctcgtgttagtctgtttcttgttaaaaaaaattgcatggctcattatagtatcctactaggcttttcatgctctaggttcattgatatacaacttttctgaatgtgaatgagctccttgaacctggattttggttaggcagattatctgcattatcttttacactattgtatttggttaagtgggttatctatgtgaggccagatgtagtgattggtcttacttgtgatgctaacaagcatgctttcaaacttacagaattgttcttttggaaaaatggaacatgaactgtgatctaacgctcttatcagtcaatagccatccttttaattgtaattttcatattagagcagaactacctagcatttccctgatgctatcataacacatgaaactgacagcgaaaattgaagggcctaatatttattgtcctacaatgttgcactttgtaaaactataaataaaattataactcattgagccgcatcctttcagaacatgttaaagtctataaggctctcatgcctagcttgacagttaaagctcaattggaactgaagatctattaccatctaacgttcattgcatactgaaaattggattaggttcttttagagcttaatagggcctgttttttttataggttatggtg

SEQ ID NO: 50319 - DNA, 666 bp, Oryza sativa
aactgatgctggattgcttttaactctcacttgtcgagtgattagtgtcttgttctgtcctaaagataccatgtgctgtaacacaaataaggtaactgattagcagaacaactaaaggtttaagtgaagctgtcagtgtcagacatccaagggacaagatgtatagcatatataatgaagatataaaatagtcaagtattcatatcggatctagattttcttggccctaagaggacaatgaaaatgtatgccaaaaaaaagtaagagatataaactcatgacaactgagaacagagagctcctaccttttggagaatatgttgatctgtttcatgcatattggagatatcatctgagctatcatacaattgaacagaattatctgaattagcataagaagaacatggtgacagtccattggttggagcaattgtttgagagggtattaataaaaagttctgctgacaagacgcaccccagttgctctcatcatgtgactgctgtgaagaatcttcggtgctatgagaagaggaaactggagataatctcctctcatcagtttcagtagatgaaggtgataacagacctggcagcaccacatcagaattcgatgtgatgttaacagctggaatttcaaacgagtcccttgcaaccttacagtcagaa

SEQ ID NO: 50320 - DNA, 1219 bp, Oryza sativa
tcggtcctctgtttttagtcgtcttgactttgtccgtgcgtcctttacttatgtgtaatctcttcgctccgtacccacagatggtagatctggaaaagtggtctttatctgttgctattctgctgaacacttttaatgcgtactacgagatgtctatacagtctttgtatagctggaattgcttggaaacgtgtggcaggctatagttgataggcattagttttgcagtaggagtcatgttgtggtgtcacctagcaaatgatattcattgggcatcaaagcagtaatgttttcgcagtaatgttttcgcttaattattgtcacatgtgtgtatgtgtgccaatagtgcgcaacacagaatccctgcaagatgccaattgactttgacttttctccgccttatatgttgtttctagttcttgtttttttttttttaaaaaaatgtcgtatttgctgattggttgcttacctgcttgaaaaatatgattttgtgattcatgatagcagctcacttggtggcatattggtcgctattttctagtcatttcatcattcatacttaagacagttatattatgatttgtttccatggatgtatttagttgttttggcgcatgcaaaactgacatgactaagtatatatgtttcttagtggaataacatgatggtgacccaacaaaaagttcatcttttaattgttctcttggaaaaaccaatggtaacacactcacataccaggaatcttcgtggatatgtgatatatcttggttgtggttctctatcatattactacctgtatatgattgttgcaatgacttcttattctatctagcaatatctgttggaccttttgacgtgccaactttttgtgcaaaaatatttctttattatttcctagttctaaaatgtttcttctttattcgatatgtaggtctttgcatatggatcagttccattgaagacttaccttcctgatggggacgttgatctgactgtactcggcaatacatcttatggtagtactttaattgatgatatctaccacatccttcagtcagaagagcagaattgtgatgctgaatttgaagtaaaggacttgcaactgatcatgctgaggtgcaatttcttgttggcatgtttatgcttgctaattgctacacattccgagccattcatgtgaactgtagtttgggaaaatccttttgtttctgctggtaac

SEQ ID NO: 50321 - DNA, 3358 bp, Oryza sativa
ctcaagaggccgaacagaagatgaggatagggctaagaccagccgaccagacaaaagcaaaactgcataaagacgtacacatgcaatggtgaaaagatggtggagccccctcctccatggccgggactaggagcaaccgatggcgagacgcgagggaaggaaagccacgtgttccggacggagtcgcagacccatcactagtaggagcagtaactagctaccactcttattagctcattcactcgctgagactgaccaccaagaagaggcaagaaaacagatggagtactatacacatacagtggcaataatactcgcaaagtacaaaagcaaaaacaaaagcgaagaaaaggaggatgggccaagaactaaaactactctccttaccgagtcacatccactgatctacaaatccatggatgtaatggaaatggaaatgtgaagccggtgaagtgtgcagaggagcaagtagcaaaccatgtgaaaccacggacagatgcatgtggtctccgtctcccgactttaaggcagctactggagcaaagcagggccatgaaaattgcctgctactacgtcagtaattctgtaccgtgccctgatccaggagaaacaaaagttggaatttttctgctcttttccttccccccacccccattgtgtagtatttgtggtgtgaatgagtgtgaccttctcctaataatccagcgatgctaccacaagttaatgtaaggggcaagtggtcatcagtgctctaatctgagctccgagaggtccttctcccgggatttctgtctgtttcttgggggaggcctacaggaacgcaatctgcgtgggtatcttcttgacaaggcaaggattggatgggccaacgaggtctacgtcgacaatgaaccaatgctaagctaacagatcaatcacacaactcatggcagattaggaagcaaaaagagttgctcgggcatcttcctacttaatccaaaactagcatatatgaaactaaaaaacgcaatctttttcctcacctagactaaacaagacaaaaatgtcatctcttgattcttctcctcacctagactaagcaagataactgaagtaacagcacaagagctccaatccgaatacagtggagacaaaaaaactgaagagactcttctagaccgcgtccttgtgttattattgccaccactaacgcacaagcgttttgtaagaagaaataaagcaggaaaaattatgcagagcggttcaggacaggcaaagacttatcagccacccacccaaccccccgagtattaactccagatacggagtcggcattaatctcgatcaataaattccaagaaaaaaataaccaatctaattctgtaccgggaactccagggaagaagaagaagacgagattttgctgcatttgcacgcctaaagaatgccgctctccggttctctccaactccaaccagagtagaatagagagcgagagatcgaaacgtataggattctactacatttgtaaggtaaacggcgcatctgcatcaagaaatccatgaaagttgggagaggcattttgtacctgcagcacaaaacacggcgaagcaggattagtagcagatcgaagcagggccggccggccactcctgcctatctcctcgtggacgccgtcgcaatgccgtggcggacagcagcagcagcagcgtccatggggcgctccagctgaacaggagaagaagaagaagaagaggacactggcttggctcctgtggccctcgctctaccagtggggccgtgacatcaccgtcgtcgagtagacgacaatgccaccgagtccagctccagcatacgactagtcgaccttgcgagtggactcacagtgtgacagggtcgctgcagctagctggtgaggaaaaaggccgagcagataccgagggaggtgtcgtgtcggggagcgcggcgagcgttttgtttaatccgttttgatgggggagccgggccggggtggtcactttctcgtgatggcttgggcaccggaaaaaccagagttggtgcggccggtcgcgacgccatgccaaccagccggcgggcgcgttaggccggaaaaccagcggacgaacgatttgtagctttggacggttagccatcttgccggttattcctttttggagaagggctaaaaaaagttgtgcccaatcgccttttgtaagaaatccacttgtggtatcgtgaattccttcctaaccctgcctacccatcaactcttctcgtcttcttttctactcctatagtagtacttggagctactggattagtactattttttattgagggaaaacaggattactatttagggatggaagtcatggtaaaattcattgacagctcctataattgaaataaggtcgacagcgacaactaactagtggtgcatatcaccatggttgagaaaggaagaacacatttttagcgctcaggcatatattaagaaacaataaatatagtagaaatcgtccataaaagaaagaactcatgctcggtgtctaaagttattttggaagatgacaattgtagcgaaaaaatctataaaagaaagaatgggtgcatagtatctagccatatcatgaaatgataaccgggacaaatatcggttatgaaaggaagagagcatgtttagcacctacaaccatgttaggaagtaagaaaagaaataatggtagtggaaattagctattttgtggaacatgtgaaagtgggtgagaaagtcgactaggaaggatggagagaaaagaggaaattatttatttctttacatgagaagacgaaattccaagactaagaggttggggctttcataggaaaaaatatgaattaccccctatccccgaactatatcggtcgaccaaattatcccccctaaatctgaaaaccggacattattcacctccaactatgcaaaccggacgaattaccccctcgacccaatccgcggtggttttggtctacgtggcagttcagtcagcaattcttttataaaaagcaggtggaccccacatgtcagtctctctctcttctatctctttcccaatctctctctctctcttctctccaacatgggcgacgcagaggcaacggtgaggtgaggtgagcgcggcggcagcgacggcgaggcagggcggcatagggggtgggcgcgagcagcgtctgagtggcgagcggcgacagcaaggcgagcacgacggtggaggaggcgaggcagggcggtgcaggggcgcgggcgcgagcggcgtccgggtggcgagcggcgtctgggtggcgagcggcggaggaggcgagcgcggcggccgacgatgagctcctcctcccctcaccg

SEQ ID NO: 50322 - DNA, 923 bp, Oryza sativa
gttcaggtttgctatcaggtccaggcatagaaactgagggttgaaactaaacaagctctgaataccctgatagaagggacatcccttctgagattttctgaagagataaagagcgtgttagggcatgtactatggagaccactactataagtggtctcaagtcaccggtggaagcgctcccgttccccttcactgctgcgcgctactcttccctttcttcgcctctccctcctctctgcccgctcgagctcgcgccgcctccccttcttcagtcaccattgtcgacgaggagtggcccgtccagctcgtggtggtgaagaaatctccggcatcgaatttcgtacttccgtgtggcagagggcgacgagatcggtgacgctcgagctcgagctctccggcgcggatccggcatcatgctcgctggatctggcgagctcaagcgccaaaaaggtccacaaatccggcgtcatgctcaccggatctagtcgagccgtagccgtcggcggtgtcttcgcggaggtggcgtcgatatgttcggagccactaccgtcggcacggattgagctggcttccactgccaagctcctctcctccctccctagcggtgcgggccacgacgaggcatgggccaactgtggcggcgatgaccaccagctcggcaactcgtcggtggcctccatttcccctttgttttcctctacaacttcctggagcacataaatcgtattctttctcctagaaccatcgttcaatcaccatttcctctgtaggcccctctgccaccctgcgagaccactccaaacctccagcgtagcatccgaacctatgaacttgagaccactggtctgaggcaccgcgttgtacataacctcaaagaaacagcaagctagggtatcaaggaaaaaaaaggtccggcaaaaaaa

SEQ ID NO: 50323 - DNA, 1342 bp, Oryza sativa
aagatggccagagcggcgaagaagttgcgccattggggacagaggaagataagcaacctgaggccgcgtctccagatcgcaaacaagattatcttccaactggatgtagcacaaggaaacaggtccctgttgtcgcaagagctgcgattcagggctggactcaaagggcaggctctacctgacgcttgcctccctagaaaggataagcgtatggcaaagggcaagaataaagtttttaaagagggggatgcaaacacatatttcttccacatgaaagctaaggcgtgagtgtgtgacggcacaagttgattatcggcccttagcatgaatcatgatggtcacatggcaaggggatatattgattcggtgatgggggttgccgacaaggaaaacagagtgatggatcttcaagcactaggtttggtaacagcagatctgtctgacctagaaccgcaattcacagaagagggagtgtggagtgtaatcaaggaattatccagtaaaaaggcaccaaggccagacggtttcacaggtcttttctatatatcatgctgggccatgatcaaacgagaagtcaagctatacaatggcaacaaacacagggtcattctgctgccagtggaaggcccaatgatgctgaaggactactggcccataagtttgattcacagttttgccaaactggccactaagttgatggctacaagactccgcgagcaagattgggaattggcgtcatacacacacaatcagcttcatcagaggaagagccattcacgataatttcatgtttgtggaagggacggcacaacaattccaatggtgtcacaaaacaatgattatccttaaactagatgtacaattatttggtcttttggggttttctctttcaaatgctacagcaccagggttttggcctgaggtggaggaactagattgttgaactacttctcactgcagatacttcagtgggaatcaatgggggtagagggcgaaccttttaagccatcaagggatctgcgttagggggaccctcggtcacccctcctctttgttctggtaatggataccttgcatgccatattgtccaaggctatcgatgcaaggactctggccaaggttgataacaaattggcagcgccagtggtctccatgtatgcggatgtcgcggttatttttgtcccaccaacagaagaagatgcctggccaattaaaaatatcatgaatatgtttggggcagcaactggactacgaacaaacttgatgaaaagtgtgatcacccacatacgatgtgatgaaacattggtgaaaatggttcaatcaattctgatctgcagatttg

SEQ ID NO: 50324 - DNA, 640 bp, Oryza sativa
aatcgacatttgatcggaatcggccagtttcaagttcagacttcggttggtgtgtagtctggctgtgtgggcttgggctgttagaaaggcctgatgggccagcactttattagaagaggaataagtctactttacgtccctccgctcatgccacaaccgcaaatcaggtattacttatctccaactcacaaagccgtcgcaaatcactcctcaaacagtttgggagatagtttcgtccgatgggcatctttcaccggttcaccccgttgactagctgagccagcacacgggccccacatgttagtgtcttgtagagaaggtgtggctggtgaaaactcaccgagggaggaggcagcacccaccgcccatgcccaacgccctcatttcacctcctcctccacccacccatcaccaccgccgacgccacatcagcccagccgccactgacccctgcgtagacctggccaaatggccgtgccaagccgggccggcccgagcacggcagtactgtagccggcccagacccggcacggcacgccagcttgtgggccgtgccggcacggcccgttatcccgtgccgtgtttgggccgatgcctcagcccgtgggctggcacggcacggcacgtttactgtagcgtg

SEQ ID NO: 50325 - DNA, 1260 bp, Oryza sativa
caagttggaggacctaaattagtgatctgcaagtttagggaccgggatgaacagtcgaacaagtttgaggacctgaatggtcgatttgcgagtttagggaccgggatgacataacggtacaagtttagggactggggatggactttactcaatacttaatgatgttaaaatgttttacttttatcgtttatgcagcacacagttcgtttcaatctttcttgctgaagcactgttatgtgcatgcaatgtttttccttgaaagatgaaatgaatgaataagtacctctgcatctatgtacacagtgttgggcaactaatagaaattgttggtagggagcaatgcattattttgggcatgtattttagttgaatctctttgtagctcagtaagattttgctttttgttgcaaagtagggagcaaagcaaattgttgaaaaaggcgagttccctcgcacagcatcagcactccgtgaagttcgtggcattggggattacacagcaggagccattgcttccatagccttcaatgaggttgtgttccacataatttatatcctattgaaatcaccatggctatgatcctttacatcctcacatgataagttgataacacaacttcttgctaatataggttgtccctgttgtggatggaaatgtccgagttatcagcaggctttacgctattcctgataacccaaaagaatcctcaactgtgaagagattctggtcagcaactatctttatcgatcactgtaaaactgtacacacacatatatatatccatgtatgtgccatgacttacactaaattagcactaaaattcatccttactgcatttcatcattttgcacaacattgaattatactgataagcaatttcagccaaaatgtgtaagttcatataaccaatttgcacttgttggataagtctttgtggtcctttgtcgtgattcttctttttgcttttgggtagtttcacctttttcaggacagcatctaccctttagcatatttttcagttgtaggacagctgcggttagtaggacagcagcagttagcatctcctttatgcctcctttatgctttattcagtttggatgccctctaggacagcatcccattcaatttcgaattttagataggagggtgcagcaataggctagcagccagctatggctatatatatatgtatccaacctccctcgggtaagtatggcttttgtgtttagtgaatgaagaaaaccagaaaatcgccccat

SEQ ID NO: 50326 - DNA, 1753 bp, Oryza sativa
aggagtcaacagcgccagtgaggtcccctaggaaggctcctctgcctctccgctcatccttcccacctctctttcttctcaaggtggtgatggggagatgtccatgccacgccatcttccccgtctccggaggctccctgccatcggatccgccaccaccggccgcagcctcataatcgcacgcttgctttgccccgccgcagacgctggcccaccgccctccttcatccatgcggcttcgatggcgccgatgcctcaccgcccgccgaagtccaccgcccattgcgtcctccgccacctacggccatccctttaagccttgaggaaacccccctccccccaaaaacctcccctcctaccctggcgtggcaggtcagctgtgtgtgcgcgtggtcaaaaggttcagatttggaaatattttttagaaatgtctattaataaaatgaaaaaaataaaaagatctaaaaaataaaaaaaccaacaatggtatgccatgtcaatgcaaagagcggttggagcccgcttgcacctgtatgacaccgaagacaagttcgtagacctaaaaatacatttagtttagtatctaaatgacaaactacgtatgtttggaggtcggccgtgtgcttcattctaatattttcattactaggtgctcccgtgcagcacacgctcgttgcatcaaaggcgtgtatcgtcaccgatgttctccttatctaccctgatcaatggcactggcgaaggtggtgagcaatctagtcattatgtgcagttacagcagatttgcccatctgtttaagagagatagtaggatagagtccgactcttactctatttctaacacctagtataactccaaaccctaaactgtaatcgactacgtacacatactcgacacaaactaaaatagacctttagttgtaaccccattggttatggtagtggtgtagtaggaagcaaatccaaccatccgttgctatggctgatggagctcgtagtccgtcgggcaccgaagtccaaaggcgatggcaagggccgcgaaggaactcttttggaggagcaatggaggccatgggccactggacggatgggcaatgaggatgtcggcggtggtgagggagtaatggcgccaactcgcagccgagtttagcagcgtctccccgactcccatctcatgttcctctcgtcgcccatgaagactgtagccatcacgaccttgcagatgtcgtgtctatgctgaggcgaccttgtaggtgaacgggaaaacagcaagcgaatgcggccttgcaagtgaaagggaaagaggcaagcgaatgcggtcggaggaagcccgcgtcggcggcggtggagctgccctagccatgccgagaaggcgataagccactcgtttttctcccttgtactcccttcagtgactactatttgcaacaatgccatttaagatatatattggaaataaaaatatattttcaccttaaaatcaaattaggaattccaaaaacagaattttagttgtaaaaatctatctacaactaagctcgaaattttggagacagggcggggtgagagaaattttggaactggtgaaattggtattggcgggctctgctcaagtaggataatctcatcagtcatcagcccactaattaaagtgctcatctcttggactcttaccctcccactcccaggccccactcccccccactccccagaccgctaacgccgccaccccatcctctcccgtcccctatacaca

SEQ ID NO: 50327 - DNA, 547 bp, Oryza sativa
gcatctccatgagatcaccactcttgacctttcacataaccaaatccagggagctatacctcagtgggcatgggagacatggagaggcttgtactttctcctcctgaacatgtcacacaataacttaactagtcttggatcagatcctttgcttcctcttcgaatagagtactttgatctcagtttcaacagcattgaagggcccctacctgtaccacaagaaggaagcaccatgttagattattcaagcaaccagttctcctccatgcctcttaattactcaacttaccttaaacttatactttcaaggcttccaaaaacaaactatctggaaatattccatcaatctgtactgctccgagactgcaactcattgatctctcttacaataacttgagtggttcgatcccaacttgtctaatggaggatgtcactgcattacaaatattaaatctgaaggaaaataaacttattggaacattaccagataacatcaaggaaggttgtgcacttgagccatagataataagggcaattggtttaaggg

SEQ ID NO: 50328 - DNA, 1307 bp, Oryza sativa
gaacatagacattttgactgaagttatcagtaaaatgcacgtactgtcaaagcaatgttaagatgaatcaccagtactaatttgtcggaaatatatgtttatacggccttatcagttatcaacaaagatagttgcttaccaaaatctcttcattgttgaggattcctttttattatcaggaatagcgtaaagcttgttagtgataactcaacatttccctttccgtccacaacagggacaacctacattagcaggaaagttgcataatcatgtgattatgtaaaggatcattcccatggtgattaggataggagattaattatgtggagcccaaattaatcatattcagctacaaagagattcatcccaaaatgaatcttataaatgcatgcccaaaataatgattttctgttagtttatcgggatatgcatacgcactgtttttttaccacatgtcgctcaaaagatcttcccagctttatagaaagacaacagaacatgcatatacacttatttgtctgtcatttcatcttacaaggaaaaacacatttcatatgcataaccatgcttcagcaacaaagtttaaaatgaattgtgtgccatataaaccacaaaactatgatacttttatatatcattaagtcctatgactgtctaacttcctatgaactgtaaggtgaattaataataagaaaaggatcatttcaattcatagtgtttgtaattccatccaaagtagtcaattggtcaattggtgaattgccaagtagcaatctgacatgagattgcccagcaattgtaacgcagcaggcatcaggaactagtagtcataattccttcttttgtaacataaaatatgttccaaacaaaactttccttttcagacagaacatcaaacagtgcacgggcactgtagaagttgtcacaattttccataaaatgcatagaacgttcccttccccaatcccatcatttcgtgtaggcccaaccatgattttgtgattaatttatttactactcacctccagcagaaattgaccgtccggtagttcccaagacgcccacatttcattcaccacctgcaaattattacacctaattctgcaactccaaaataaaaagaaaagccaaacaagcagaaactgtggcatatttcacaccaatctgccagaattcattacactaaatgaacagccaagttgtattagcacctactaatatggaatatttcagatgcttctttaccaaacatatgtagtcatcgacaggtgaatttttgttctagttacttgttgaagcagaatgat

SEQ ID NO: 50329 - DNA, 923 bp, Oryza sativa
aattgtttaactaaaaaatagatccatcagtttgaatgaaaatcgatgaccaaatagtttaactaaaaaattgtatcaaataatgtgtccacttgttggtttaagtataaattagttgatataaattataaattgttaatttgatagatataaaatataatggtataaacttcagacaatgtattatttggaaataattagtccaccagtttaagtaaaatattatcttatattattaatttaatgggtaaaaattaactttataactttatttttaaacattgtagagctaatgttcagttatatttatttgtaaagtgttactttatgattatatatatagtatatgtttgtaatactatattttttaaatttattatgactaatataattattttctcacatatacatgaaaaaaggtggaaagaagagggaagctggtgtatttttttaattgatgtatataatttgtgtttttagtttttttggctttaacgttcattttttggctttaattgatgttcatttttgtcttctcacataatgttttacgatatgtatgtactttgtatcttgggtttttttacgagcaatacttatgtgaacaggagattagaagaagggagttttttaaaaaatatatctaatctaacgggtccatcaatttatgtgaaaattgaaactagatgttttgcttttttttcttagaatttcaagcaatttctttaatttattagagtgccacgtgacggcttaagagcatttgtagaaagtttaatgaacttttactatataatagatagataatttaaatatagaatgctgaagcagtgttgattgatattttatatgcaagatctagtttaactgcatatatttatagagtaatatacattattcctaaatagtagaaaatactattt

SEQ ID NO: 50330 - DNA, 647 bp, Oryza sativa
tgcatttatgtgtcccccaagccaaatcatgagacaatcgacagaaagatcttgaagggggagcatggaggactaaaacatccacctcctcaaccttcaataaaatgtggtgtaaggaactccactacacgtaatatcacgtacatatttctatatatatttaagttcatctgaatctaggtgaattttcgcatccacaggtctatgccaactatttgtcatatttttgggcaaacaacaactttacacgaagaactctaggaatcaagaaggtaatttcggggcaccttttcatttctaggaatcactcctttgcatttgccatacgagcacatttttcaaattatctaaatgccaaatatccagggcaccataaatgaatgggttaggtgccacgaacatgatctaccatacaacatcgacatcaggagcagcataaagtatcatcgaaatgttacactaaaaggttaccgtgctttggtatattggtaataaatgttattggcaagttctcagtagtacctgtacaagctattatttagaacatttcaatagaatatccaaactagatgagatggctatgacaaatatatatatatataccttagacaagtacatgccatggctatcacaggaaaagggagtat

SEQ ID NO: 50331 - DNA, 629 bp, Oryza sativa
tctttgcatacatagtaattcgccaggacaaatgaaactacattatttataactaatatacgtggatgaagtgttagttctccttttatttattgaagtagttgatggtcgaaatcggtacttaatgaccgtcaacaatacccccaaactaaacctttgctcgtactcgagtaaagataaactaggttgttgatcaggagtttctaccttgttttatgtcacaatgttgccatgagtagaatatgtctttcgtatataatttgaataagttgataatagtacttttacctctcttaccttatttcccatggggcttttaccttctccttgtcttactctttattcaactttctttccggagggtttcacgaattatgcaaataaaacccaaagtttctcaaatgattctcgcatatcgttcaatgcgtataattccttaccaaggcatagtattgccttcttttttttattctatctctaaaatgtttatacgtggagctcaaggtgggagaaaataacgagacaatacttgtattacatatattgcaaaatcaaaaataggatctaatgagaaaacaaattatacaatcttattgaaagtgcatctaggcccctcattattttggtgt

SEQ ID NO: 50332 - DNA, 726 bp, Oryza sativa
gggcctgttcaacgtggtgtagcattgatcagtggagatttaatgtcaccttaattactcaacagttttactgttttgctaataaaatgttttacaaccgcctttatgcaaatagccgcaagccatccttgtatccccttgcacgtctgtatcattggtgtggcttgttgagtacggtggttgtactcagccttactattattccccctttttcagaagtatagtgtttctgagctaaagacgaagttggaggatcaaggctcagaccccagttgagttttgcctgtggagtgaagctgaagccccgctaggatcgccttttccgctgctgctgctttcgcttcggtgcgaggactaagtgcctcttctgtaagtattttatgctttatttacgtttggaactatatattacttgttgttttgtgtaccctggctggtcttggacagggatttaatacacaaaatagtctggaaatttgggttaaatttctgggcgtgacacgcttcgactcgttcgtctcgcctgtatcctcctccgccgcccttccctccccttctccctctagcacctgcagcctccccttcgctcccctctcccagccggccggctggccgcttccctccccctgcgtccccctctcctagctggccagccagccgcttccctccccttgcgtccccctctcccggacggccaaactgtgagcaagcggcacctgtgaccgg

SEQ ID NO: 50333 - DNA, 664 bp, Oryza sativa
ataaacatacattttgaatatgccctgaatagctcaatcttgactaatgaatctttagttaaaggacgagggttttttttccgttcaattcctttctttctttctacttctagtagttacctccggaatgtgttttattaccatccataatccaatggtccagattcattcactctcttttgcctggaataaaatcaacggctaatatttgtcaaatgatgtggctcattcccggttaactttggagttacttttcactttgttaagattagtctgttggtttctccttgaagaataattggatgcatgcataccttcaagacataccacccgcgaatgtatatttgtgaacgacctttttcacgggttacattcaattatttgtgaaatcaatgatttgattattttttatgaacaactggaaagaaagcctgcgcaaatacacagatatcttatttatttgttgttcagaaaaaaagaatgctaaaaaaaatcatatatcactatatacaccataagagacggcagattatctaacaataaaaagtaaatatctttgtggtaaaatagaggtagactttatgtaacacccaaattttttatacctaaacacactagtacagaaactgataggtgccggttgggaactagcaataggtgccgg

SEQ ID NO: 50334 - DNA, 637 bp, Oryza sativa
gaaacacacatataaagaaaggtcttgctaattatcaagaacaatccatgcaagacaaaatcatgagaaaattcatgaaagcacaaatcaatataatcagctcactataatttttactcaaattaatatttaaatttcttagctcaataattcagtcaaagcagtcaactataggatgtaaaatttaactttaatctgctaaaaacataactcacaaaaatgtgcattaaactgcatagaagtgtatgagtgaaataatttattcacatactaggttaattatcaagagcaaatataatttttctagagtttatttcttctatttagacctcctaaaattcaaacaaagttctggtgagcccatattctctatttgtctgacagcaaactacacataattagtacaaccaaagaaaatagaatctagataatttcatctacctccggaaaaatccactataaattattctgcacagaaattaaataattgaattactaaagtgagggagagaaataattcaggaaaatcgttggaaaacatcttccactcatgttcctacccttacctctcttacccacatagctaccatcgacctgggcccatctagcagctccttggccacgcgtcgaccggtgc

SEQ ID NO: 50335 - DNA, 983 bp, Oryza sativa
tggttatacgttagagggtctataacgttataagccgagaaatgagctgagaaatccttcccaacagttggaccttttaatctactactattggtgcttctgtctgtattagcggaagcaccaataataagagatcggttcttaattattaattgttgttaagagacatgcacataatctctaggcgtttcataatcataaaacttttgagatgtgaacatacaagaacttggttacctgtataccaagacacgatagcctctagatgtaagattttgatggtacttaatactgctctctatgtcctgagaataaggtagtccatcgtcatggcacctcacccactcatccacagttccctatatatgttatgaacatcaggagaaacaagaaaagtgtgatgtaaactgcaaaagtgaaacactaccagtcgatatggaaaaataatattaatttaaataccttttttattccaagattttcccgtgtgttgttgctgttagcccagaaatatgacaaatagttgggataggtctgttgatagaagaagtaatgtattgattcagcaaaagttttgatggcgtagcaagatcttatatatgccacatcatccttcactaataattattacatttaaacatcatgcaagcatgctatattatctataattttataattattgaattttagttctttaaaatgcaagaatgttaaatcatcatcccgcataattcttatcttactataaagctataacccactaaattctaaaactctacatgcaatgatgacacatcatctttcactaataattattacatataaacatcgtacaagcatgctatattatctataattttattttataattattgaactttagagcttaaaatgaacgaatgttaaatcatcatcccatacacctatatagttcatcctcacttagttaatattatttctctcctctcatttagctatatcat

SEQ ID NO: 50336 - DNA, 645 bp, Oryza sativa
cgaagaaaaaaaaatcccagaagactttctagtgattcctcatgtgaacatatagtataacttagctaaatctataattagttaggccaatgaatattttgtaaataaattaacttatgttaaaaccttctagaagctaagataaactaataaagcatatataaaagttcttaaacatgatcaaaatttgtgcaaagcgcgactatatggttagtcattgatgatatatatagacaaacaagtttaaaggccgacaatacactttacccaatatgatatttaagttactttgagatgtgcttttcttcaattgtttgttttcagcattatattcaaatgattattgttttctctgaaatatcaatgagaatataccatctggatatatgcatgattgctatataatttatatttatgtcgtttctcaatatataattattggccggtcctccatgttattcgccgggggaacaaagcatgaacttttccgtcatatacgaacggacattaacgagcattcatatgccatgtgcatttggacggtgatcaatcgttggcttgcacttataatgggaagtttggttcaacgttgaaatatgccataccacggccatatcttagacatgacgacactacataatacga

SEQ ID NO: 50337 - DNA, 1164 bp, Oryza sativa
atcctccatttgtgcaagttacacgatatgcacatccatcatcatagtggtatgctggaaatccaacgcttaaacattgcaaagcacctctccggctcaaactctggtgcagtgtgtccagcaccctacatttggagagagtaaaacagtattacaatgcatattcaaaacaagtaaaatcacaaacaataattagttggtcttttgtcaagttcttgaatttttttttcttcttctatcttgtcgttgatactgactaaggatgaaatataactggtttctttcatcgaactgttaataatgactacgggttagatatagaagttccttgctgtagaggccactaaaggaatagtttacatcatcaatgttgtttgattatttgaatgctagaaataaaataaattaattatatgtcctacgttcagctcaaagcatatgttattggatttgtttccattatacgaaaacggtcaaagcgtgcctcttaggctgtaattttgctgtatatttgtgttgagttgcatcaactgcctttggtcattgaaaaacataagctgaatgaggaagagagaataatacttttatacttcaacactccccaatgctatacgtacaagcaactcatagaagtgggctgtgtttttttatttaactatgatggaagccggtgcagatgcgtgggcatattagttattgttttatgaaagcaatgctaaaagaagtcgctaaaagaagtcacctcttatcatttctatgacgtgaaatagaccgtaaactttaatatatttaaatgataaaaatgtctcctagattaaaaaatcacttttgtcccagccacataatgaaataatatgtggagaaattataattacactttgtcaacttatgtcacgctataggatagatgggaggccattaatatatatgttgaccatgcacttaaaattgttatggcaatggaaaaagctatggttgtttcaatttaagtgaaaaattaaaaaccaaattattttacgaatttattagattttctccaaatggctcaacttagtctgtattgacatttgctattttctgtttttttattttacatggttcttattttaagttagaaatataggcattgtgtacatttaactgttattttagttatgaatatgg

SEQ ID NO: 50338 - DNA, 665 bp, Oryza sativa
attaagattaacgcgcgtcctcagcaaattaagataccgtggtacaagggaaaagtagctttagttataatcaactagttgggtggcccgcgtaattgcgcagctagcacccaaacaaaatcatatatttttcagtataattttacttaaaatctattaaatagatatattgttgtcctaagactttgaaaggccaaatcttatcatcctcatatttctaattaaatagtttttaaaagtcacatcagttactacccctaacttatgtcatatcttacttctgtcatatccttctttatttgctttgctcgatctactactattattcattctccttagaacctttaaaaattagatcttatagttttagagtttattgtctcgttgggttttgtttttataatttctagaagttatgtcaaacgctgccattatacttctctacggcccgtccactgtcgtttctctttattgtcattgggattttaaaaatcgaacataattatcgttcgggttcttttttactttctagaagtcccgccaaaccgtcagcggctttaccattgtactcctttatggcatgcccgctgcctcccttctttattgtcattaagattttaaaatcaaatatgattatcatcggtttttttttttactttttaaaa

SEQ ID NO: 50339 - DNA, 1286 bp, Oryza sativa
tatatatatatatatatatatatatatatatatatatatatatatatatatatatgtatatatatatatatatgtatatatatgtatatatatgtatatatgtatatatatgtatatatatatatatatatatatatatatatatatatatatatatatatatatatatatgtatatatatatatatatatatatatatatatatatatatatatatgtgtgtgtgtgtgtgtatatatatgtatatatatatatatatatgtattctatatatatgcataatatatatatgtgtatatatatatatatatatgtgtatatatatatatatatgtatatatatacatatatatatatatatatataatcaaccatgcagcaaacagggccatgcaaataaaaaaaatggtacacagatctttagtcccggattcgtagtcccggttggacaaccgggactaaaggggggttacgaagtaggactacaaacggtttctccaccagtgtagggagttttggtgatataaatagacgaggggttgaggctagaaggataactacttttgagagagaaaagttaggatttacttcgatgtttcaattctagttcgtgagttgagagaggagtgctttaagtgcactttgtaaacacatattgatgcaataaagttgatatactttcaagtgtttcgtcgatacgtgtttttctggatcctgacggtttgaccggaggcaagtctacggtctaaccgcgggcggtcacacccgcggcaggaagggggttcaaccggtggcaaggcggcagttaaaccggtggcgtgtgagcggttcgaccgggggcaacagaactacgtcgagatttccatcgatttgagggtaacttttatttccgctaaaagtttttgcgttttttattttccctatcattcacccccctctggtaggcttggttacttgtgttcgatcctacaacggtgaggtagacggccaatctgagacgagctcctccaggcggcggcagcccaagcggagacaaggccgtccgtcgaccgcggagcccggtggaggtcgatacgccgacggtcgccactggaggtaaggcggtggaaaccgcgggcccgaggtggaggactatgagcagaccgacgatgaccggagactctgctactgctgcttgatgacgatgcaaatgcccgagagatcaatctctcttaggacaacgacttgatgatgcgaataaaaaaaaacggtggccgccccgggacatctaaaccctcccgggacga

SEQ ID NO: 50340 - DNA, 635 bp, Oryza sativa
cctgtttagcacgaaaaggaacaaatctgtcagtaaaacataatccagtgacgaactacaaaaatatgatataacagaacctagatatgttctaagcagcaaggacgttcttggcaaggcaacaagataagttgttgtattttgaaatgctgaaaggcaggttacataaaaacaacatccaatgattgaaaagaatatacttggaagacatgtgattttattttttaaaagaatacatgaaaaccaaaattgaacacaaggcatattgtaacatgattccattaaatagtgaactcacagcaaaattttccgaagacatcatagagttgaaattggtctttatatgcttcaattatatattgcatgttttatcaataacttatctattttctatatgtgatgcattgtttagtggcactgcagtctgcatcacatattttgccacttgtgcaaagtattcaagccatttcacttaaggacttaaggtggtaaaaaaaactattcacatcgtaagaataaaaattgtagagtggtaccaagagaaaatgggtatgaatgtgctaccatatgtgtgtgaaaatataaaattaaaatgacataatttggatagaaaggtaaagcacaaaagtcaaaac

SEQ ID NO: 50341 - DNA, 524 bp, Oryza sativa
tggagcaacatgcaagttgatcctcttcttgagcaacttgagtaggtttttacctaatactcatgctttggtgatggctagaagtgcctctgatcatgcttcgattaaagtccaaattgctactacaatccccaaatcaaatgtatttcgctttgaaaacttttggctgaattaggcaggttttcatgatcaagtcagaaatgtgttggagggcttcagagttactcaagatcaggcaaacataatttcggccaatttcaaaagattaagaagctctcttaaaaagtggagttcttgtttggctaaactctccaggactacagagaattgtaacaaggtgatcttgtttcttgataaactggatgaattccgcttattgaatgttccagagctaagattcaaaatgattgttaaaagccagttgctttcttctaagttggcagtaacaatattggaagcaaatatttaaacagaaactggttcttcttggaggggaaaacacttagttctttcatgccatggcc

SEQ ID NO: 50342 - DNA, 538 bp, Oryza sativa
tacaaagtagtggagaaatcacttatcttactcgcctgttttttttctctcttgttatggccataaatccattcattcagattagtcatggagcaagattttcactttttactcttcataagaagtgaaggactgacatattttttctgctatcttctttacaattcgaaagacttacattgataaacagagagtgattgtgttatttgaccgcataaataggaatatgggatttttggcgtacgcacatatttacgtgtttcccattttctcgaaacacattactgcattctcgtatggaattacattaaaatgatgaaaaggaaaaattagtgaacaaaataaacatgttttttagcatcttgtttctacacaatggatttttttataatctctcttaaataagttacaaagctttttccactgatcatgaaagattaaataaggtatactctcgaacatgccacataaaacatatacggcccaagtcttcgtaaacatgaatgtcatcatggttgtcattgtctaactgcttctt

SEQ ID NO: 50343 - DNA, 547 bp, Oryza sativa
ttctttacaattcaaaagacttacattgataatagtgagtgattgttttatttgatcgcataattaagtaggaatatgtgatttttgtcgtacacacatatttacgggtttcccattttctcgaaacacattaatgcattctcgtatggaattacattaaaatgatgaaaaggaaaaattagtgaacaaaataaacatgttttttttaatggaacacacaggggaggcccccgctgttataaaactttattaaaaaggagaaaagcaaaatacaattacaaggaattaatccaagatataactactaatttgtctctctcgttaagtctaaacaaaaagaaggagatcaccctttaagagttgcctccaggaagtcaaagaaggaacttttccatcaaaaatgagaccatttcattgcttccaaataattcaaggaacaagaaggatacgtttccataaagcaaagatcatgatgtcttattttagcatctatctacattggtcccaaactgaaagatgtattccagttaatgccaactgtatgcaa

SEQ ID NO: 50344 - DNA, 826 bp, Oryza sativa
cttactcgcctattatttttctatctctttggggttggccgtaaatcctcctctcaaattagacatggggcaagatttacattatttgctcttcataagaagataagatcgaacatgtgtttctattatcttcctagcaattctaaagagttgctttgaggaatagtgagtgaatgttttgtttgcccacataactaggaacatgagatttcttggcatatgcatgaatttatgtggctttcattttctcgaaacacattagcgcatgctcaaatggcaatagatttaaaatgaagaaagcgaactatgagtaaacaaaatgaacatgtttttgatcatcttggttttgaaaagtgaaataaaaacatctatcaaataaaatacaaagctttttccactgattgttgaatattgaattagctactctcacgaccataccacataaatggtatacgtggcccaagtcttcataaatatgaatatcatcgttgaagtcattgtccaactcttcatccgtaagcatgctgcagacatagttatttgtttgatccaaagcaatggagaaatcatcttttgctggatctagctatttgtttgaatggccataatacctccactaaaactagacatggggtaaaattttcgttgtttgcgctccataagaaggaaggaagaactagttttttttgctatcttcttcgtaattctgataacaacattaggaaattgtgaataacttttttatatgccaacattagtattaatatgggttgaattcttggtgcatgcacatatttttgtgcttctaccttctcaaagcacattg

SEQ ID NO: 50345 - DNA, 1758 bp, Oryza sativa
aatttagcaacatctattattatatatgttagctttaaaatagactaatacttcctctattttatattataagttgtttgattttttttcctagtaaaacttctttaagttaaccaaatttatagaaaaatatactattattttcaacacgaaacaaatatattatcaactatattcaatattgttaggtttaatgaaactaattttatattttagatgttgttaattttttctataaacttaatcaaacttaacaaagtttaacttaaaaaaatattgaacaacttataatatgaaacggaaggaatagctcacagtgaactctatactactccctccatttcacaatgtaagactttcaagcattacccatattcatatagatgttaataaatttagatagatatatattatatctatattcatattcatattcattaatatatatatatatataaatgtgggtaatgctagaaaatcttatattataaaacgtaagaagtactaaacttgctcttagagcaagtttaatagtatagcccactactagctctaattcacctatagccaaactaatagccaattcatacaatagttaattactatactattaatatatggtcccacatgtcatacacacattgcgttttggagtccacgctgcagctggctatagatctgtagcccgctgctcttctctttcattttttatctcattaaaatatgtttatagttggctaatagtctgttattgtacctgctcttagtgggctagtgggaatacgggggactaaagctaattaatcaataagctgcgggcgtcgctgcctcgccggtagctatagttggctccggcctaggggcctagctagtgccacgtcggactgcttgatgctgacgtgggcggcggttgcttgcgtgtacatacaattctttttatttactaagcatataaaaaaccggaggagtattatttttggttttctgttttctctgcgtacgctgcatctggtcgtgtttgtatctgctgttgttgttgtttggttaacagaacaaaccgtccacgagtggatttatttatttatttttgctctgtgtatttggttgactgaaaatgaccggtgttctttgcaaaccaatatataaatccatccgtgttagttaaggtgtaagtgctggattggtccagagatgcattttaataatcatggtgctataaacgagaaaatgtctcacgaagcatcttacgcatattgtcgatctatgtggttttctgatgtactagtataatagaatttaaattagtttagatcgtagcataatccagagctaactaagcggtttgcaactgttaatggattcacattgtttgattcgacggctcaaggctacccattgccgtcatcttcgtacggattcaaatcatcgactttaccctttaaatgcagtggaaaccaataataaaaatgagttttaagagggtggcttgtagtgattattataaccgttggaaatataagcacaatctatttgatgtaatttatattatgtaaagacatttaacatatggacatatcaaatatgcgaaacattttggctacgtgtattggcagtcagtggcggacccagcgttaaaatttagctatggcggactaacgtgccatatcgaacatcattgtaatttcaacaaataaactaaaatttgtttatacataaatcacactatatttacactcattaggtagaaaatatagcact

SEQ ID NO: 50346 - DNA, 5269 bp, Oryza sativa
tcacccccttctctcatgcccgagcccaagaatacctcgtgctctctctcccctcttacttctcttctcaaatgactcacttcctccttctcaaatcgactcgttttggagccattttttgcgggaccttttgaagacattgaagagcaagatatactcctccattcccccctctcaaatagacttcaataattgttttgtcctttgtgttggtttttagtcactctttatgtatttgcctgaatgcttgttctttttatgagattattgtaataagtgcctgtagcttctttgaagtaaagaccaggatttattccattatctacaaaattgccccctctttttttcgttttaatcagtgaaatttgtagatcgaagggtaatcttataacccatttcgcccccccccccccaaatttatgaatttgaacgttgaaattggggatttgttgattatagtgttacatgtgtgcaatgtactcgttggtgctacgattttttagagtatgtatgtagtaatgttgattaagtttaacatgtttgacatgtcactattttaaatatgcttatattttatacttatagttttggaacagaagaattgtatgataggataatgctaacatattaaattgttctctaatatttgcacatcggtttttggcatgtacagtgttataatatgcatccatgtaccatatatttcttttaaatttttttatatatgcaattattaagaaatactaatttaattatttttatattaattgttagctagaaaataggaggttagcttaaaagaaagagaagacacgggaggggagggagtacatacgtgcaactatttctaaacataatagatctaaacaatttaattagtgggcccaccagttaagggaaaatcaaccgttgatattatttttcagaatatttagaatctttctaatttattagattgccacgtggcggcttatgagcgtttatagaaatccctgtggcagcttgagagcgtttgtagaaagtttaatggactttttatatataatagatagatagatagatttctattaattaaaatttatgttatcatatttttcctcaaaagtattttcttatgattatacttttgtgtcacataaataatatattaaggaatgaaccgttagtgaaggacttgtcctaacaaaacaaaatacaccctatatttttaaaatagtgggtgtatataaattaacaaataacatagattgccttacacatacgtaggacttgttaatctacatgcctcacattgcatcctattattcaattgaaatttttaaacattggtgtgtctttttttctttttcaccaataaacaactgttcagaatgtaatttcaatattctaatgcaaaagaaacatatagttgttgtggaaaggagtcttaatatcggtcctctatgttgaactgaacaactactaaacaaacagaagtttacatatctttcaaatgtaatatatctgaagctaacaattccaaaaaaaaaaagaaaagaacttacagtttgaggcttacacttatcaatctcttaatattacatctttaaaatggataattaagcataaactatgccttcaaatgatactttttcaatagagtaaagtccatcatcggtccctaaacttgtaccgctgtgtcatcccggtccctaaactcacaaatcgaccgttcaggtcctcaaacttgttcgactgtgtcatccaagtccctaaacttacagatcactcgtttatgtcctctaacttgctcagttgtgtcaccccggtccctagacttggatttgaatattatctgggttaaataggacggtctaaagactttatatttaaaaataattcataactttttcatgtgaactctaatgaagacaaactttatatcaaacttgtagccctcgacacgatctacaactttgtagttgattttttttattttaagtcattttttgtcccaaaatataattttaaaattaaatttcaaaatctataaacatgcaacaatattttgggaccataaacagttttaattcaaaaacttttcaactacaaagttgtaggtcgtgtcgagggatacaattttgatataaagtttgtcttcattagatttcacatgaaaaagttatgaattattttttgatataaagtttttagattgtcctgtttaaggaccggggtgacacaactaaacaagttggagaaactaaaggagtgatctacaagtttagggaccgggatgacacaatcgaacaattttgaggacctgaacggtcgatttgcgagtttagggaccgggatgacacagcggtacaaatttagggaccggtgatagactttactcttttaaataactataatttagttttgaagatacagtctctatcagaaaatatatctgtgacagactaacacatgaattattccaatgatgctgaaatcttgaacttgaaagctgacagtatcaataatttagtcataaagagataaattgtgtacaaccagtgttcacttggcaacgtcaactcaataagaaagtgatgcatattgagagttctatgtaaaaaaaattgtctacatgctattctaaaacaatttatattaagttgtggtagtccattttgcattttacagtttcgtctgattagttcataataaattcttcctaacctcacttttgctgacctatcctatcctatcttagtataaagttataacccactgatcctagagctcaacatgcaaacatgtcacctcatcatccactagcaaaaattgcatatacaaaacttatgcaagcatgcaacattatctataattcattaaattctacaaatcaacgtccaatcatcttccttcacaatatttttaacatataaatatccatatcatttttataatacttaacatatattcatccatataatcaaagtacgggatatcatatttcatctacaatctcatatagagtctactaaatgtatttctctctaaacatagtttgagaaaccaattttatttgttgttaataactaatataatttttacttttagcttgattattaaaaaaatattaaaagttacataggaatttccgcagcaaagcgtagggaattacctagtatatactaccaattgtccgaaatagggtccaatatcagatctgattatttcagcttacatcttttcgaactggtatatccaccatttatttttgcgggaaaggtatatacaccatgtctcatgctcatggatgaaaaaacatatctgaaactaataaaaggggttatgtccctagtttttcaagtttaccagttaggggatacctagcattgtaattaacagcaattttacaattggaacttaatgaaagttgagtgaaagtaactccatttatttctttgtaaaagaactgactattgaccttctgtgtaggacctatttggaatagggacacaaaattgcaggaggtcagttaatgtacatctcaagtataaaaatattgtaatatctcaaacaggcagattgtcttagagcaattgtttcataatctcttgggtagtagtacgatgaagtcacaatgttttcatggtcgtcaaaattcctcttgaacttctgtatcatttgtcatttctctgaaatttgtgataaaactttagcaccatgtctgtacataaacaaagtgcaaaaatataattttcacagaaaataattaaaatcgttaatgtcacacttagttatctttatatacttttagaagctattgaatccatagagtggaatattattatgcaacacaaatgggcatgaaagggagaagtaataaaggataagaaaattgtattatgaacatcgacgatatagaaaatataagggaaaattatggtgaactaaaaaaatctgaggggaccaacctgctgaagtaagtaagattcagatgtaattacaaggaagaaaaaatttgcaaggtggagaataacagaagaaaaattttggtacataaataaatcaatctgataggagagcattgtgccaatttccggtggatgggaataaggatatcgataaatgataaatagacctgatggctacatgatagttgagattagctcaggagagatccaatggctgatgttttctaggttatttagcttaacataagatggactttaatatcgtcaacgacaaggggttccactcccatctaaattgaaacacaagattctagttattccacattgaaccgttgctttgtgctctaaatttacatgctaaacagaaaagctacttaccatttatatcatactttcttcatatagttctcgagaactctattatcatatctgaaaataattatttcctaccttttttctgtatgttacttatgacatcaacatgaactccaacacactatttgaccaagacttttgctaatcataagttcatgaaaactgcaaaataataataataataataataataataataataataataataataatatgaaataattttaaacaaaatgtaattatttttgcctattagtgcaaaaagaattcaaaaattctgacggcaagaatttcctaatgtaaaggtgtatagctaataaattctcccttcttttcaaaatataaggcctattttgttttgttaggtactttgaccaacaagtactctatataatattttttatgaagtaaaattgatattattagattcgtcatcaaaagtactttcttatcattatactcttgtgtcacataaataatatattaaggaaggaaccgttagtgaatcccttgtcctaacaaaacaaaatacaccttatatttttctaatagtgggtgtataaaaattaagaaataacatagattgcctcacacatactccctccgtcccataatataagggattttatattatgtaaagacacatatagacgtccagattcattgtactaggacgtgtcacatccacccaaaatctcttatattatggaacggatggagtacatagtagttattgatctacattggctcgcattgcagcctagtattccgttgaaatttttaaacattggtgtgtctttttttttctttttcacctacaaacatctattcaaaatgtaatttcaatattctaatgcaaaagaaacatatagttgttgtggaaaggagccttaatatcagtcctctatgttaattgaacttaacaaccactaaacaaacag

SEQ ID NO: 50347 - DNA, 662 bp, Oryza sativa
acagtagctcatcaatgcaacctctaattctatctataaaaccttcacgtggccttgaaaattattttccttactttggaaattttaatccccttttaggtttttaaaaggacggtttaccttaacttttttttaaaaaattaacctttttcaaaatttccaggcaaattaaatcatccacctttcatttttatcccctaatatgtttcctaaataacctttttccccctttaatgtaacctttaaactgaatttcttgaaaaaaatttctaacttcattttccaaagaaaaacccggccggaaaacttgaatccgttgcttcccgtgaataaattacttatttggtttgcaaaaagacacccttttgctttgtcacctaaaccactttttctcatcaaatttaaaaagaaaccctcctactataaatgttggggatgttcatataaatgttggatttttatcaaattttattaaaaaagtatttttctttttttttcctttttgcaaatggacaccttttgctttatcaccaaactaactctttctcatcaaattaaataaaatggctctaactcatatcaattcttaaacttggaaatattcatctaaatatcccatttttatcaaattttgtaataatttatatttccttttcttttca

SEQ ID NO: 50348 - DNA, 506 bp, Oryza sativa
tatgtctcaggttatgaaaagactaggttgaattctaacttcatttgtgcacgatctaagattgatgctactatctgttggtccaaaccattcattggttactacagtactggtcgtgagtggaaactggggcaggttgaattgttaacactaccaggacagcgcagtataagaaataatttcttttatatgatgagcaagaaattagcataacacattaggatggaaagattaactgacctcattgagccatttccccagcttcctcaagggcttggagaagccaaagaagatattttgcaagagtttagactgtaggtaatcaagcttttcaaccaacagtaggcccttctgcctctccgttgcatacccacgcctgtgaagaaaaagggttatatattcattcgtaccatggtgagttacatgtgtagataggctatcaggttgcaaaaaggaaacaagaggggttacctgaatatgatagcattggactcagctgccttttt

SEQ ID NO: 50349 - DNA, 6391 bp, Oryza sativa
cagcgtccgcgcggcaccgtcgttcccgcggaacgtccgcgcggaaccgcacggaatgcctcgctcccgtgcgccacatacgcgcgaccggcgtggcaaagcaagcagcacttgcagcgcatgcattcagcgaaagcaacgcatgcattccttcgctcgatcggtcccgcactgctcttctgcatgaccgccggttccgcggaatggtggtgcgggaccgagatggttttgcgtatcccctatgcagtagaggtatatttgttcaaaattttatcgcattggtatataaacgcaaaacgctaaaaattaaagtatacttttaattttttttccttttttatcatgtgtcaggaggaggtactggaaacctctggaaatttccatatgtttagccgatttatggttttttaatacatgtacccttttgatccaatggccattgtttatcctaacgctttatctgacggctaatatatttgtgatgatgtggtgcattctcgtgtaacaaagcttgttgctttcactatataagataaggccttaattatacgcgactactactagcacgtacttcatctgtcccataaaatactaaactagaatcagatataacacatcatattactatgaatttagacatatctgtgtttgtgtttagattcgttgcagtagactatatcatatcattaatttttttagacgaatggatgtgttggtgcagttgaggacttgggggtcgtaggctgcaggtgtgaattgaccgtgtaaatttggagacttgtaactcccaatcttcttctcgattgtcaacctttcatgcttgtcctggtcatatggtactactcctgtcctgtacttgtgcctaactccaagataattaagcagtaccaagtctcatcctctgcgctgctcgcccttttgactctccacatgccaacacacgagtgaggacaataattccacatgcaccacaccactgtagtagctagtagaaccaaaagctgaaaccttgatactatcaagaatgcaaaggatgtgttcagtgtaaagtttggattttggttaaaattaaagatgatgtgactgaaaagttgtgtgtatgacaggttgatgtgatggaaaatgactgaagtttggatccaaactttagatctaaacacagtaaaattaaactgaaggaactaaaatatcatggacattgtaaaataggcagaccaaaaaccatactcaaggttgcccttatttacggctatttatttttttagtagtaggcgatatacccattgacaacaaggtgtttagcataattttattaatcttaagatatttcaacccagtcttcagatgtatttatagtgctaggtgtttatgtgtgtttccatagaggtgaatatgcaagtgtatacatatatacgatgtataaaaaaatgtatatacaaaacatacataacgattgtctcactaacatgtgggaccctgtaccgcttctcaacagctagccaccactcgatctacattattgtgccatgctaatttaagggtgatatatactcaaataggatgggttatataaagtattttggctacatataactttgctccttttttaaggagctaaagaacaaggtcaagtatgcaaaaccactcttttagcagcttctgctttttctctctggagtctggacgcgctttggtgatgatccaaagcatctcgtttcacattttgcctcggccaacgaagctcttagttggcaatcacttgagacttatataaatatatatttataaaccctaatatatacaagagagaatgtgcaatggcttttaaaacaccatcctctcttgtcctcatcgatgtgtgccctagcatccattctatctcctcactgcatgcaaacaaatttatgctctgaaattattgagccaccatccgtagtgagcaaaagttaaatatgacaaaagtcagctgatcgatggagcaaaagcgtgtgatcaaattgacggttataactatagggttcaatgcaccaaccagtttacttgaaagcttatgttgatggaaaaataataacaacatatctacttgaatactccatattgttcctagctagttattatcagggttacattaagctgtagacttaaaacaaaccactagttatttgttaatactccctccatttcatattataagtcgtttgacattttttctagtcaaacacttttaagtttgaccaagtttgtagaaaaatataatagtattatcaatataaaacaaacatgttatcaaaatatatttattgttaaatttaatgaaactaatttagtgttatagattttactaattttttctataaacttgatcaaatctaaaaaaatttggctataaaaaaattcaaatgacttataatatgaaatggagggtgtaaattttttttattaatattgtgtaaataatagaattttaagatcaatagaactaatttacagaaaagcttatagtgatgaggagatatgcaatatgtttcaccaaaataaccgaaatattaggcgttccctaattaatatatgtcattcgatggaacataatttttcgctatcacaaaatagtgtaattccaaaatatcgacaagcttggttttcactttcatttcaccgactgtcgtcgatcatttgctgactcacgaatcgctaactaatttgaaagcgaagctaggctaattacaagaacgataacatcccagcatacctggggtggcccatggtcgcacacatggagtcccagattccaactttcgcgttgtaatagctacaattaatcagagaaaaagaaaaaaaaactatgattcgaaaagcatcgtgcatgggagaaaggaggccagagagaatttcgttatcaccacgcactcaacagcgatgggtggttaccatggatcaatcagccctccgacagcctcctactgtggatagacaagaacagaggccagagagagccaaatcagtgaaagatttttgtgaatttctaaaagcaaaaaataaagtgcccattggtgaatacaaacacacggcttactcacaatatatatgacctaatttgtagatcactcaagttgttgtttggtaggtcgtttgttccttcacgatggtcattgtcatttccattcattgacctttttttccctgaatctggccacgcacacaaaaatatacatacaggcacatgtatctcattattatttttcaaatcaaatgaaagatgcactaccacagaaaacagaaacacatctttgccgactcgtcgctacccgcagcgtgtgaaacggcggtgataagagtattatcaatattaaaatttttagactgagcaaactttaatataattagtagtatttactataaaaatatcattaatttacttatcaatattaaaatttaatgtatttttcaccgggcagtggcggagccactgtgtatacataacgagtgcaaccttttttttaacacacgatctatactaaatcccttaatctcatcactatatatattcgtgatttagtatttgtgtcatactgccatggtgggtaaaatcagacactcacaacttcatgatttttttttcacttattttagtcacatcccaatgtataatatactagattgcaaaaaagttttaaactgttagcatgtactccaaccaataatttcttggttttcttagcacatgtagtgctcctgtatttattcggaagacggtcaggccggcttgctatacgtaggtcaattagtatagacgccagagagagcacgtacgtatgatgggccgtattaactaacaaacaaatatacatgaacaaatttttgtttgaaggataaatagcaagaacaaattgcccaactgccaaaaagaaaaatgcacaactagtaattgaacaacatgcttaagtttcttctcatgtgctatcactgtactttgactagacccatccgtcttaaacaattaaccaattaacacgggggaggagaagaacacaactaattaattaacacagttcgcccgggacacttggcaaaacacaacaaaaaaaataaaagatggaaattaaattattcggaatggagagagagagagagagaattgaatcatggcgtccaattaaaatgatgcatcagatccgaaatggatttgtgttgattgggtccctgtcgcgccgtccggttgctggaaacgtgtttgtgttggttcgttcggccgatcgatcgagctcgatcagagaaaaaatgtgcttgatttcttaattttgccgaatcaacacgtaccaaagtctaatttagtgtctaattagcttagctatatattagtcgtagagcatgtcgagttaattaataagtaattaatcgatcgagcagcggttgaacaggggccaagaagcttcagaaaacggtcgatcaatcgatcgattgatcggccacattaccaaccgatcgagcgccaccaccaaacgccaacgcgtcagtcaccaccggcgaaacgagatcgagaagtttgaattcaaacttgaaatttttgtcagttcaaaagagagagagcgcgcttaggattttctagctgaaatacagtctgggtgaagcgaagaaaaataacgaaaaatcagaggcaaggtggtgttttccgattgtcgacaattaaaagattccaccgataggacacactgttgcaactctgacaggcacatgcccaaaccttcaatcatcctactgatgctgtagccactccaataaacagggaagttcaagctaaattcgaaacctttgaacttaaactatagactttaattcaactcaatatagaaaaaatacaacctataaaaccgcttcaatccaaagtaccatagttcgtcgagctttaaaaaaacaattttcccaaaaatatggcgctatatttttttctcttaattccagtcactttctttcaccatgattgttgccaaagtataaatttttatatcctttcttcaatggttcaagttgataatcaaccgtgttattttcctagttctagtacacagtgagtacttagaaagcaatgtttgaaatttcttttttaaaaggtacaccgtaaatatatggactcacagtacaattcatggaatttcgtgtaataccggtttaaaaatatttatagtgtaggtacatacatagaaaaatatctatttttgatgaaaaatatgacgctagaaatacagtgtcaagaaaaattggaagtgcaagtgaatttttttaacacttacaatacactcacaatgtatgcacgctcacctctataaatacccacgcacccccctacctatccttataagtatcttcaaaaaactgggttgacatatcttcagatttaggaagtcagcatgaacgttttgttgtcgacggatacgtcgtctaccaccgaaaaaaataattaaaatataagtacttgtgttaaatcttgaacttaatgaatccggatggactgatttcatcacgacgagcctaaccaagtgaaagtgaagttaactctgaccaccaaacaattgcaacgtccaaacatcctaggatcgatatgtgctcccagcacacacacatggtcgctacatagcaatctgccactctgttctctccaactttgcatatgggggctatggtccagcttagctgatgctccctcatacactcccccacaacccaataatcaaacccaacccccacatagacacactatcacactgccgtttgacgatcgttttcgccgcaaataacaacccctttttccttcattcagtcaatgcaatcaccccctgccctccctcccttcctcctcccttccctcttctcctcccaaattcacccccaaaaaataaaataataatcaccaaatcgatcatgaccagcagtctatctagctcctcttttcttttttcttcttctcaatctgccatggtgatcgatgggtctgtttaggagattttggtaggtgcagcctcttccagaattagaagcttccttaaaccattcagtatttcattcagattctcaaaaactaaagttgtagaatccagaaaacgcactaaattagtaagaagtattctcataagatggctatcaaccaacagtttctcagaatcttaagctcacctaaacaggtgcgacgtgcgggtcccaccctgccagccaccggggcggtcgatcacctaacaccccccttctctgtcaacacggttcttagctcgcccgcgggcgcggcctcgtcggacactctcgcgctcgcacatataatagcccgcgtccccgtggagtggacagacagacagacagcccaccacaccacaccacttctcccaccatcgatccaacaccc

SEQ ID NO: 50350 - DNA, 679 bp, Oryza sativa
gtctaggccgagcggcgacgcggcggcagcaccaccacctgcggcacctccgccgccctcagccaacgcctccgtgtcaccgttcgacgtcgccgcgctcgattgtgcgccgtcgtttcccctttttctctgcttcaccgccgccgcgttcgattgtgcgccgccgtggtctccctcgccgattcctcgcgccaccaccctcctggagctcccttgaaccaccccaacccgccgccttggccgctggcctcctcactagctcccgcgccgtgcctcccctcccgccgtcgccgagcgcagtcacgctccgccgtcggcccttctccccctcgattcccgtcgctgtctcccttcccgtgtcccaagcaaccgtcccgagtcgccgccttggccgctcacgcctcatctcccctttcgccgcgccgccttcttccgccgccgcatagcgccgccgcgtgtgcgtcgccgatgaccatctaggccgagcggagatagcatcactgccggcggcgcctccaccgccctcagctgccgccgccgcctccgcgccgaggccgccgccctcagccgcctgaccgtgagagagagaggaagagagagagagaagagagagaggaagagtgagagagagtatgacatgtgggccccacattttttaaaatatagaatggtgactgga

SEQ ID NO: 50351 - DNA, 664 bp, Oryza sativa
taaccactccaatatttagccgtcgtgctaccctaccctagcaccgactagaaaccaatccaccaaataaaccccacctatccaaaattatcctttcttcgattttaatcaatttccgacctatagaaactatcatctctcttttatccttcaaattaaaattaagtttattctatacacattcttttctcctctcgcctcgctctaattttatttactccttggtttttatcgtttctttgtagcaatttgcttataggctttatttgctatctttttcgtattcgtatgttagaccgtacagcaagttctatcggcatccaaggagctgacgtggacccaaatggctacgctgaagccgtgggaaatcttaaggcacaaggcaagacacaattaaaatttttaccacatgaaataatcaacccccatatttactttatgcataagttaatcatatgaataacatcattgtggtggcttaaaatgatatttaatgcttttaagcattgttatatgagattatggaaagatatactgaacatcattttatgtggtttattattcaaacatctttacaaacttaggaatccggttaaaatgggtatttttgaatgttatacatgatgaagtttgttggtgtggggagttcggaaagttttgggtg

SEQ ID NO: 50352 - DNA, 796 bp, Oryza sativa
aaagcaagacagcaaatgcacagtgcagaatagtgggttacgcatcgaggctgctagtgacggtaaaagttgacaatgaaggttttaccactgtcaacttggctaacaacgcatacaaggatgaaccgttcgttctcgccaaacaagttgttcaagtgttctacatagttgatccgtgtaacaagaaactacatgttgttcgtgaagggaaaagaagaattgttggattggacaatattgcagatgaggatgattataaccagcacttccatggcataggtcaagaaatacctctagaagaggaggaagaagaagatgacgttcaatatgcacgcgtcgaccatgaggaaggattatttttgtaatttatgtacgtagtttatgtctacatgtctgttatctgtatgactctaatatgttcgcaatgatcaatagtatattgctgatgaaatagtcaaataaaataattaagtgaagcacccactagaagtgaaataaaataattaaattattataaccattgaaataaaataataaaattagtaaaataatgaagtgcaattactactgttagtgaaataaaataattaagtataataaaaatatatagtgtatgtggaaatatgttaaggaaaataaaataactaagtgaaataaaataaaataaaattgctgtaggctaactcacctgtgacgggctctaactatggggccctcacaggtgacatcacctgtgacggaccagagtgttgggcccgtcacaggtgggatcaactggggctgacctacagttgga

SEQ ID NO: 50353 - DNA, 729 bp, Oryza sativa
aaccatccaacttcttctccattcccttccacttagtttcatacaagtagccgaaacccagcactaaggctgtgttcgacggtgcaggatgggaacccatccctcctgcacacaaacggagtgatcttttaacacatgatcaattaaatattggctttttttttcttttgaaaaatggatcatatgattttttttaaagcaactttcatctagaactttttttttttgcaaaaaacgtaccgtttagtagtttaaaaagcgtgcactaggaaaactgtcacaccccgaactaatcccgaccggaactagcccgtgacgctccaaattaacctgttaatcgataccagtcccaggaaacagtgctggtatcacaggaagacagattatcacagcaacaaaggtctctttattatagagtaggagtacaatcaagtcgggctgcggacagatcccgagctcacaactgcattacaaaagggaagcggaagccaagacttggaccaaacaatacaggcgcgacctgggaactaggccgaaaccctaaaactcatcgtagccggcttgctcctggaagaactcctcgtcagcgggatccacttcatcttcttcagcaactgggggaggggggattatttatatatagcaagggtgagtacgggagtactcagcaagccatgggaaataagtgtttaatgcaggctccaaagaaagggctgttggttttgcaat

SEQ ID NO: 50354 - DNA, 651 bp, Oryza sativa
atgctcgccctcgtcttctccaccacacttaaaaatttttgccccgaacgacctctctctgcttctccttcaccgccactgcctaaggcatccccgcgccgacgcctacgtcatatctcgccatcgtctcacgcacttcgtcttcgacaccttcatctactccgcctccaccgaatctctatgttgagagccgactccccatccctttctagctctctctctccgatctcgatctctctctctctctccctctctcccaaaccgccggcggccgccttgccacgacgccgccgcggcaccgcaccgtcacgccgccacgccgctgccgcgcaacgccgccgccgtgccgtgcgcgtcgtcgccgacgtgcgacgccgtcaccgtcccgcgcgccacgctcgcactggcccgcgcaccccgccgccgtcacggagcgccgatgccgcgcgcgccaagccgcagccgcgccgccccgccgccgatccgctgccgccccgtgaacgaacgaacgtgaacgtgaacgtcaacgaatgtgaacgagcaaacgaacgtgaacgagaacgtgaatgaacgaaacgtacatgaacgagaattgaacgtgaacgaacgagcgtgaacgaacgtaacgaacgtgaacgtggacggacgtaa

SEQ ID NO: 50355 - DNA, 549 bp, Oryza sativa
acgaaacgtgaacgtgaaatacaatatatgttacttcgtgtttatcctaatacctttttttggatggtgccaaaaaacctttttcgtctccttccttaagcccgaatgggagcttaccctctaaaggattcccgttagccaatgacctaaatatatattagaatggatatatttatagcgctattaacactattatatttaatatgacactcttacacttaactttatagatagagttttaatactatattatgagagttataatataagaatattatagttaaaatatgagattattatatgtgaaatgacacttaatatataattattgagcagctagggccctaatacacgtcttctacacttagcatatatgactatgggagttataatataagattattagatgtgttattacacttaacatatggggttgtgtggggttctaatataccacagttacgactcagcataagattatgggagttataatataagattatgagagttctcgtataagattattatagttataatacaccattatta

SEQ ID NO: 50356 - DNA, 639 bp, Oryza sativa
ccaaaattttggaccggccctagaacattcaaccgcgacgggcatccaagtaatctgttcgggcctaaataaaagcccttaaaaaaagactgtcatctgtgacgggcattaaacttatctcaatcgggcctctagttggagcccatcacaaatgactccgtattggtgagacggagcttcttttagggccctgattgatatatggaaccctcatctcaatcgggcctcaactatagcccgtcacggctaagggtcatccgtaacgggctgtagttctatgccgatgtcccatggttgtgcggccatatcggcccaattgaaattacttccttgtgacggcccgcaaatactatacttgcaatgggccgcaacagatgaacggatctgacctattgattggatactccgtcctagggactggctcctaggtgccttttatttaaaatccagcacctattgatattttcctacctaccgcgggataaacattagagaatcgaccccttggaacacctataggtcactactataaaaatcttcattggaaccggctaattggtgccggacctttcaaaacgggcacatatagacttttcccaacttggggggaaaaaaaaaaccggcccctttaaccatgct

SEQ ID NO: 50357 - DNA, 530 bp, Oryza sativa
taaattccccccaccacctagtgtaactgtatcccactgttcactattttggtgggaggctgtaggggcgattttttgtcctttttccaaggaaaacagaaattaaattcccaaaagtgatcaaaatgaatcaatcaagtgagtaatattattcattaattgagcaatttcatcatgtcttacttttgcaatactgatcttacaatatgtgcctctaatttgttttttttattttgtagcaattgatcgaagttggatgtatgcaaaaaatttgaaacatcattctacggagtacagaaagggtgtaataaattttatgaacgccgcggaggaggatcggaaaagaagaaacagtgattatatgtgttgtccatgtgcagattgcaagaatgagaatatgtttgatagcggagaggacatacacagtcatctgatacaacgaggattcatggagggctatacatgttgggtgaagcatggagagcaaaaatcaggaagtggggcagcagcagacagaagtggtgcgcata

SEQ ID NO: 50358 - DNA, 706 bp, Oryza sativa
agggtggcggcgggtaaaagaaacccccggggttcctttattaccggttaggggccggcggcaaaggccacggtaaccggcggcggcaatggaaaggttagggttcggaaaaagacaaatccaattcaaaatcaattccacggatttccaaccaattttacccgataattccaaaaaaaaaaaggtaaaggggacctcggggatcttttcccttttatcattttaaccggaaatggaagaatccaaccaattttgaaaaaccggcggcggcccacttcgcttccggtccgcccggccaacgccccaagaaaacaaccaatcccaccagtgggccccacctttcaaccggccaaggccccccccccccggccgggcttgggtgtgggcccacctgggcccggaaagagagaaaaagaagtttgggtccactttcggcccaaagccaaaagaagactttttaaaacttttccaatttaaatttttcatgaaatgcgatttcatttattaaaaatactttcttggctcaataaatcccacaaaaatctatgaactatataatcaagccaagttttaataaaatttatctggcccaatttatattggaattattattaaaattagatcttctcttttaggcgtttaaaattatttttaatatttcccaattaaacaatattttatatatttgagattttagggtgtgaca

SEQ ID NO: 50359 - DNA, 742 bp, Oryza sativa
atcaccggtgatggagatcggccggtggtactaatggccggacatgggagagaaagagagaaagagagcttgaggactcggtttatgtgaaggggaagaggggacctcctcatccttttataagccggcaaaagccgtggcgtaaggcggttccgaggaaaaaaataagagaaccccgcgaccggggcgtggaaaaatggaacaccgcgcccgctctattcgttgattccgcgggtccaatccgcggctgacctccgcggcgtgatgtctcaactgacgtttgtgacagatcctttccggtcaaaggaaaaacacagcggcggcgcaaaaccgcgggcggcatccggaagtggccaaaccgcggcgaaagcggcgccctgtgcgtgcgccaagtgcacccaaaagaagagggagcggctctgccatgggcccaatttggccggctcggctcggctctgctgacaccccaagaggggggaaggagacatgtaaacttgtgctgattgggttaattgaagggaattcggcccaaaatgaatatggggtttaggaattttgtgtggagggatttgaaatggaatttcccaggagatgaaaactaatggaaaatttgaatggaggggtttaattaaattaaaaaaagaaatatttgggggttcttttgaataaagagtttaaaagcaaaaggagtttgaaatattttttaaaaaaaaaatcaaagatatttattttaagaaataaa

SEQ ID NO: 50360 - DNA, 727 bp, Oryza sativa
cctgaaaaaatttatcccaaaaatggtcctttatagcgcgccagagtggctggcgccgtcatccaacgggacggcgccagcatgccaccgtggcgcatgcgaaccgacgtggcatgaggagggcgccagccatactggcgccgccccagggaggagggcgctagcatggctggcgccgtcgcctccattcctgtttctctgtatggagttgcaacggtgtcatttttattttatttttttggatttttttttcacactcaagatcacgatacaaccaaccacaaaaaaaattaaactcgaactaccacttagctaagtctgaaaatagttagcataccacttagtctactttgcaccttcactaaaattagaccataattcatttagtaaaaccctttgattagcatgttaaatataatgcactttaccactatatgaaattacttaatctaattcaaaatataaccacatgaaatgacatatataagttaaacagtacatagagatgcaatttttttatttttatttcatttttttgatatttttttcacacttaggagaacataggaaccaaccgtataaaaaataaactcaaacggacaaaatatgtgacttgtagaattttccaaaactctaccgaaacggacaaaatatgtcatctattaaaataggcgtaactttctcatacggactcggaatcaggcaaataatatatgcacgaacatct

SEQ ID NO: 50361 - DNA, 1621 bp, Oryza sativa
ggaaatagcttgacctaaagtttaaacaatgagtgcacaagtctgtataaaaagacaagaaccttttgttatttgttagatcatcaaactaaaatgcgattgaaaagtgcagcttgataattggtaacagacctaggagaatgggaactgttaagaatcagagaaaagcaaaccgttttcaacatgcttttaggacattttctctagaggaaatgaagacttttttgggtataggtgagtaaagtgtatcttgtgatgttcagtgtactgtacttatgtttggtgcattggctgttgagatattacacaattctgctatatgcatgcctgcaatgtgcacaggacacccttgtactttttttgataaaggtagctatttactgaaaaaaaaaagacctatttggttagggtcatgtcacagtagagtgcctagctggcgcataattatgtctgataaaaaaaagggtttcatatatgtcttttggtaacacttgattttttttttctttttgctcactttgttttaatacagaactctctctgaaggttgacacattttccttggtgtgatcaggagatactggtatttgttcactagccaaggacatactttatcaagaatacactccaagggatgattaattatttaatcaagggaaaaggatactgcagcgtcaaggtaatttccaggattccaccagtcatatgttagttttcttttattttctgcttctctgaagttcttttcaacctcacccccagacaacatttttttctaatatagttctgaacaaacagcaataacttggtgcaaggtttgatctccaatctgttaatgactctgaaagtaatactacctccgtcctattttaagtgtagccatgagtttccgtgtccaacgtttgaccatccgtcttattttaaattttttattattattagatgataaaacatgaatagtactttatgcatgattcatttttgttaaaattttcaaataagacagacggtcaaacatttgacacggaaaatcacaactgcacttaaaataggacagagggagtaccgagttattcatgttggacatgctacaaagatttggcttattgtggatcagttcacctgttgccatcatatacagcaacacttcgcaatcaatggataccaaaagcagaaagagaactaaaagtagagtcagtaaagcatctagatttcacagctgatgcatcagatgcaatacacaagggcaatttaatcaattaaatcattaagctagaacaagacagtgggctcacggcatgtatacatcatatagtggataatggagatatcctgcctatcctacatgttgctgctatctgaagtatgtgcagaagacaacgtggcctacattcttacagcttttcttggaccaaatatgtttcctagaattgacaattcgacaagataagaatctgcagactgtaacaaggctgtacgcgtaccgatgatgattcaagtaaatctgatttggtaggcttaaattcccatccgcggctatagaaacatcgttacttttccatttaaagcagaaacataattacttgatggatattatcaaatataactggggcattgagtt

SEQ ID NO: 50362 - DNA, 559 bp, Oryza sativa
ctatcttaatgaaatttggtcggccattcattccaacggcccggcaaaaaaaaaatgcaacggcaaaccacgatggacaacaaatgcaacggctggtggcattcgcgcaattcgtcaaacacctcacgggcagcacaaatccctcccagcccaggggaagtgaacaagaaaataaaaatgctccggggtgaataaatgggataaaaaaagaacgaagaaaaaaacaggaaccatgccttatgtggaggtggcggcacggtgacgagctgggggaggaggaaggggggcggcggcggcggcggcggtggcggcgagggctcaaggtgactaagcgggtagcgtacgaggtggaggcaggggggtgcatatcccctggagttggtgccaaatccaccgggtggagttggtgccaaatccaccgggtggatttcaacaaatctgaaccattagttcctttctaggactacatgtagccacgtcatcttctttttgccaaatctcatgcgcgagaactgaagcatgccaagaatcttctacccatctcttgatatgacattaa

SEQ ID NO: 50363 - DNA, 1109 bp, Oryza sativa
aacatgctttggacctatctactttttagggaccatctcagattcaagaactggttagaggtacacatgcgttgcagatgtgttgtagtgaatcagacaagataaatagacacaaaacagcataagcatagagttacttacgcataaatggtgtttcctttttccgaaatctccgaaggaaacatcgaagtgcatgatatgatccagtgaatcctccaaaaagtaatcctacccggcaagcttcctccctcactattagatctttctccgaaaccagttgctgcaaattagaaaagaaagttatatcaatgacatcttatttgaactttgtagtatactagtagtagaacagtaaatatttgtcagaaagggaagtttgggaactggaccaattattttattttttaaccttttcttagtaatattttaaaaataaaccatccagtattttgttttaaatgaacctttcggccatgtcacggctgatggcaaggcaaaacagtgaaaacacatgctacaccatatgctattatctcggtgtggcagaggttatttttcaaacattattaacaaaaggttcaaaactttttttaagaaaaaaaaatcatactggatagcctcacaacagggatcgaaccatttaatgcatagcaagaaacatccctccaacaggttatttgatgtgcttcaaacactaccagctggtcctacacaagtactactagtaccagctcattaccagttcaccactaactattcaagtaaatgaacatagagcaatagatgtaacatcacaatcaagaccagcataatatgtgaccctgtcctttgctaacacatttgcacgccctaatgtgcgtgtgtccaagctccaacagttaagcaccaaaacccccaattccactccaattagccaaccgaaacaagatgaagtaaattcgcacagccgaatcccagttcccggccaaattctccgaataattccgtccaaactaaactaatctaatatggggcgcagttgagcactaaccgaaagaaatttgcaaattcaggtaggaggagaggagcaaggaggaccttgaggtcgaggagggaggagtaggatctgc

SEQ ID NO: 50364 - DNA, 564 bp, Oryza sativa
catcataaatataatatgaacaaacttcaacaagaaaagaagggaaggtagttaaatagatccacacatcacatgtgattacatcacatcacatcaaagtagtagatagttcaacacaaaagtagttcagaactaatgcagctaagacccaactaatgcagataagacccatctaatgcagctaagacaccataatgcagctaagaaagacaccatatgcagcaatggcagagtgcctctagtgcagctaagaaaggcatcatctaatacaaattcttatgctggcaccatctcttcaaccacataaatcttgcttcattagtgctaatattctcaaacataactctgttatgtttggaagcaaacaactgtgtggcacaaaagtattccacattgtcttctgctgcaccacactctactgccaacttctgacagtgtgtcaaggactcagccatttctttcttttctttctgcttcccttttaaaaaacccctttttttctccctgctgtaacaagttcagtaattagggtattggacttatcacttttagaggtgaaagaat

SEQ ID NO: 50365 - DNA, 728 bp, Oryza sativa
ctcacattcgattgtgttgttgtggaggcaataaaagatcttcttcaagacttgaatatagtggcagggagctcagtctcaaggctcaaggcacaaaggagctaaattccattagctttggactttgatgaagttttccatagaaaccttgattttctttcactttgaaaaaaatactctatgttagatttgtttccctggacctactaattacttagtgtggagttcagacagtatgtttgatatggtttggaaagttataaagtgttcccaaacagagcatgggtattaccaatgattttgttctaatccaaaccaatcacactaacatttagctctcttctgaaatgcagaattgggaaagtagatggatataaaaaaatacatgattttgacacgaataagaagtacaacaagcgattgcaaaagacagggataaaaaggaaaaagaaaaagagaggaaatgactgtttgattagatcaaatgaatttgaagatagataaatataaagaaaactttacatagggttagacctcatgttgaattttctccaaaacaaacatagaatgaggcattatatatgaattccataagattcaacaatgtctagtcctttgaaatatcaaagggccatttgaaaaaaaaatctatataaatgaaatactacaaaattcctatgcttttcatttaaataaaatgggtgttattttcaaaataataaataaca

SEQ ID NO: 50366 - DNA, 821 bp, Oryza sativa
gctaatatatgccaatattgacattatttgagaaaagttagccacgcgaatcacgaaatgtgtttttgccacgaacacacccgatacactccaatatgtacaaaaatcatgttttggctttttttgaactttttgattccagtagaaaacatcgcaccctcgtgtgccaatattggcattaattgacaaaagatcgccgcgcgaatcacgaagtgattttttgccacgaacgcacccaatacactccaatatgtccaaaaatcatgttttggcgttttttgaactttttgattccagtagaaaacatcgcaccctggtgtgccaatattggcattaattgacaaaagttcgccgcgcgaatcacgaattgagtatttgccacgaacgcacccaatacactccaataagtccaaaaatcatgctttggtgctttttgaacattttcattctggtcaaaaacatcgcacccgtgtgggctaatatatgccaatattgacattatttgacaaaagttagccacgcgaatcacgaaatgtgtttttgccacgaacacacccgatacacaccaatatgtacaaaaatcatgttttggctctttttgaactttttgattccagtagaaaacatcgcaccctcgtgtgccaatattggcattaattgacaaaagttcgccgcgcgaatcacgaagtgagtttttgccacgaacgcacccaatacactctgatatgtccaaaaatcatgctttggctgcttttgaacattttgattccgttaaaaaacatcgcacccgtgtgggccaatatatgccaatattgacatta

SEQ ID NO: 50367 - DNA, 744 bp, Oryza sativa
ggtgtttttggaactttttgattccagtagaaaacatcgcaccctggtgtgccaatattggcattaattgacaaaagatcaccgcgcgaatcacgaattgagtatttgccgcgaacgcacccaatacactccaataagtccaaaaatcaagctttggtgctttttgaacattttcattctggtcaaaaacatcgcacccgtgtgggctaatatatgccaatattgacattatttgacaaaagttagccacgcgaatcacgaaatgtgtttttgccacgaatacacccgatacacgccaatatgtacaaaaatcatgttttggctctttttgaactttttgattccagtacaaaacatcgcaccctcgtgtgccaatattggcattaattgacaaaagttcgccgcgcgaatcacgaagtgagtttttgccacgaacacacccaatacactctgatatgtccaaaaatcatgctttggtgctttttgaacattttcattccgttcaaaaacatcgcacccgtgtgggccaatatatgccaatattgacattatttgacaaaagtttgccacgcgaatcacgaaatgtgtttttgccacgaacacacccgatacactccaatatgtccaaaaatcatgttttggctctttttgaactttttgattgcagtacaaaacatcgcaccctcgtgtgccaatattggcattaattgacaaaagttcgccgcgcgaatcacgaagtgagtt

SEQ ID NO: 50368 - DNA, 2538 bp, Oryza sativa
aaatagatgatccaaagtcacattaaaagttaatggtgtgtagctagtactagaaaatgaaaaaccggttggtagctccttaaggatcgtaaaatttctattgtgatgatacatttgcctttttggtttctaggcactgaaggcgaaggatagagtttgcagttcttcacttcctaaagacttggcaacatgaggttacatcaacagaagagcaaatgcatgcagttttattggatgcgaagtattacaaataaattgtttttggtacccttggcagaatcaatgaatgcctgagttttgatagtttgagttagctagcctaggtatgatttttgtaacgcgcaaaaacctatcagatcttgtattacacattctagatataacaaatattagtgtttcctcttgaccattaattttcagaacgaaaattaaatataacggcaacagcattgttcttgtcaatgcagcaggccattgtcaagcatggatagtcacctatagccaatttatttaattcgtgggttgaaaattagttatgaccacatgctgcactgcttctgccgttctgcggggccgtcaattccttttagttttatactgccgcacacatttttgtaagttcaacgtacgctgccaagacaaactattttactgatatatccagctaaattgcggatcacataatatctggattcttactgacatggtgatatgcagcccggggcaacatataaattgtttagtacaatactactgcgcagcggcggttgtatagcacactagcgcagagggcagtaaacggaatagtcatataaaaatttaattgaattgtagtttgaggcaccttttgttgcaaaaatttcagtttggactacctttatgtaacctttccgcttctgatatacaaaaggtatgatctacacatatttggaagttcatcaacgtgaaactgctggtgtaatcaaaatcattgatgtagtagaaaagagagttcagctggtctaaagtacaacaatggtaaagtcacctaatccaaaataaaaacattagataaaggtggtccaaattagatctttggttatagaagtggtccaaactgtaatttactctcaacattttactacgtacattgaagtggtagggtggggtggagcaagctacgcacgcagagtaaaagatggaaacatctggtatacgtaaataagtgtgggtggttttcaatatttatgttttcgcatgtccattatatgtccttctactaccatggaactctaagtaggtggcacgcacttatggatgccaaaacaaaccgtgtctctaaaatgatatcaaagacaagttgaaagccaatttgcgtgtgataacttgcttggttgaggccagacgtctcctaactaatcatcatagatgcttccaaagaaagcacataaatgttgtggggataaaaattcatagatgcttgtaaagaaaacatgtatgtgagtgaggtacatcttcacatacgttattccataaaaagtgtccctgtaatgtatcataaatgtacgacatacatgtgtatctgattacttattcacatatacgagtatgtatcaaaattgtagatattgacgcgatgtacaagtttgtagtggacaaccttttcatttgacattatttacatgtaatatgcgttacaagttctcagatctatttaaagaaataatctttcaaaattttcaagtgacctcagatgtatatcaaagttgtaaagcttgatggttgacgcgatccacaactttatagttgacaatcttttcatttggcattgttagaatatgcggttcaaggtttcacaactattagaatttttttaaaaaaatttgtaatgacattagatggagacatgctctatatcaaagttgtacaaatcaagaagatctataactttgatgatgacctttccatttgaaatcatttaaaattttaataaatacgtattacaagttttggattggtgaacctagctaaaaagaataggatcccttattctatcaacaaatgcatcaaaagtgggaaggtaagcagacttggcatggagggcgaggtcccaggttcaaagacatatttcctagggtaactcattttttaatcaatccccattcttaaattgttttggaccttttctagctcaactagagttacctgttttattatggtctagcaaatgtttagccccaattttcctttctactacacgaggcattcagctttatgttgatcatttaatttcttgttaacaatgcattgccaaacttcagatttaagcctcatattcttaggttttgtttctgtacgttgtgaattagcaggtcattgggcagagtttgtagtagagtttggctagagcccatagcatagtgttaatgaagtctgaggctcccacttgtagcagctggattttacattctatcagaaaagagtgattaaaaaacatagatctaggccttaagcacatactccctccgtcccaaaaaaaagacaaaccctgtgtttccg

SEQ ID NO: 50369 - DNA, 776 bp, Oryza sativa
aagtgaagtctgtaggttggcagaggccagcactggttctgcagaatgtgtgatccattattgatatttgcatggggcacattaccgtacggcctgtgagagcctataccgtgcacatttcatggataatttatatgagaaattgcctagccaaatccccaagcatgtcgtcaccactggccttgagggaaaacttagtggaaggatgcttagcgcaccttggtgagtaagagcattgcgaacacagtggtgtagaaaagctagtggcaggccattatgactgtgggtgagtcactgaattgaatgggagcagcatccaggggttgctgatataaagaaaagactgatgataggaggtgatctgattctcgaagcttagggggtttagtagataaactgggtacttcagggtagttaaaatgtattttttttcctagtctattatttttgtcttagcaatgctgtaccatcagcagttctctattaaatcctgataacagagagcaatctcatcatatgtccgtttcacaaagactgttgttctagcattcaatttttttatcaaaatgtttgtcattctcatgttccatgcatttttatcaaaatgtttgcattggggatgccaacagtcaggagcataaggggttcaagctctgaaccacacaatttatgatagctttgggacacgtttgggatgaactaaatgagggtaaccatgtcattttccacaacttctttgtctgatatttgctagatcaagaatcttgggctgcagg

SEQ ID NO: 50370 - DNA, 762 bp, Oryza sativa
aaaaatgcacaatatctcggtaagggagaaggaagccaaatcaagattcaagagatggaagtttctttgataggtaaagaatcagaagatttacaagtaattcaatggagcgacacatgcataaatcattgaacgaaaaaatagcatcgagtaaacaaagccacaataggacagagagttctttcgaggcagaaaacagagagacgtgtagagaagaagcatcctgcatattgcatcaggagcagcgaaatgaacagaagaaggcatctagctaatacaaattcagaaactggcacttccgcagcataccaaaacagaacaaactgaaaagagaaacgaattgatgtggtttaatttctcgagcttgcactggtagaaatagagaaacggaaggcaagatcaagaccaaatagagaaacggaaggcaagatcaagactaacatgttccgaggagaggcgaacgagatcaccatgaagcttccgtgctcttcaacctcctccaagaaactcacacacccaacttcaaaagcatcaagcaacaacaacacgggaaagggaagccaagaacaggaggaaaaaaatgatcacggccaggtaaaatcttagcaaatttcggattccgaaacgccttaaaattcgagaagagaacgaggcgccgttctacttgatcaatacgtaaggaagacgggcagattgcatcaggaacagcaaaaagaataagaagagggcatttggtttatacaaattcagaaactgacacct

SEQ ID NO: 50371 - DNA, 561 bp, Oryza sativa
ttggataccggccgataatgacgtcgtggaggatcaggggatgatagaaagattctctgtggtgctacttcattcggaataaactgggatgatctctgctgagctgatccgctagcttaactttttgttgaataaacttcagggaaatctcatcagcagatcttctccttgtctgagaggtggacccacagctaacttttggctgactttgagaaacacgaactctcggatgtctatgacgtctattctgggaggagacacaaagcacctacataagtggaaaccaatccaaccagtcagagctattggataggaaaccatagacgtaacaggaaaataatattccacccagtaacaaaaaggatactgtactacgtagacaagacaaatcagccattcgaaagctgctactaggatgaccaaaccataaggctaacaatgactacttaaaatagaaaggaggatgaaagaagcaagccattactcctgatgggataagcctaatgaatactaaaacatacgaccgtgtgaaaatcccttcctgctaaataatcctataca

SEQ ID NO: 50372 - DNA, 1044 bp, Oryza sativa
aaggtatacgttagaattacagttattaatttagggatggaggttagtacagtagtaaactaaaacatacacaaacatatataggaaaaagagaaaaggaggaattagcagcacgttggttgctaggagtactccagtacgtaccgatcttaatggacgtaacgcggaggccgcacgccttgaggacgacgccaatgctgctcgccgtcacccccttgccgaggccgctgatcacgcctcccatcaccaccacgtacttcatcgtctctatgtacctagcttcttgctccttgggttaaaaacctaacgcagccaacaaccaaaggtaaattaaaattacctgatcgatcgctcaccggccgtaacttcagcccttttattagccgcaacaagggcagagctggactcggactagaatttggtttccacgtcgacagtgcgtcgattagcattcagttaggggcttgtttagcaaataataacaaccatacatgttggaataatctggaggagtatatgtcacaccatgatgttctgttccttcagacaaagggcacacgattacaacttaggactgaaattacaactgaaactacacgagagactctggccttctctctaaaaaaaaaactacacgagagtcatcatgtgtcagggtgtaattaagcaacctacaagtctaaccaaggcaattaagtgctatatagccacaagaaaacgtatctgcctttgtggaactaggcaggcatcgcgcttttctgctaggatcagtctaaagccatggcatctgaagcatcgccgctaccttcatctgtgctcatgttctgctgctcttcagcgccagctctcagctcatccgctatgctcctctgctcatcttcgattgagatctgcaattcctcgacctgtaatagatacaacatcagaaatcaataggcatcagccaaaacaatgaactgcatggcatgattaaaatagctacatatagtcttccaagttccttcttagacaaatggatgctaatagttataatttgataaaaat

SEQ ID NO: 50373 - DNA, 1370 bp, Oryza sativa
atggcagagggttggtgccctgctgctaggggctcagtcctgcctgcctgtcccggaggttccggccgtaggcgggattgggtcggtactcttgtctatggctaggatgggttggaaactatgtcacgtcttccgtctgtataccgtggtggtatgtggcacgtggttacacgtgagaaagacgtgtcttgtgggtaaagatgtacacctctgatcagagtttaatctattcgaatagccgcgccctcggttatgggcaagccgagcaatgtacccaagttagtgttttaattcttaaaacccgcttaacaactaaaatgtggaatggttggcctgggttggcttgggacgagctgggacccagggtcgggttgccagttcggtctgaatcatcgtaggccttgggttaaggcaggttcgtgtgggttcacggccttgattaataatattgtttagtgctaggatcgcgtttacaaaatagccttgagcaactaaatgtctttaaatgctgtttactgcaaccctaaccctttatattataattcccttgtactcccttgcatttattctgcatttgtgggtgtgtcttgttgagtacggtggatgtactcagtcttgctcaatttttcccaagtccagaagaggagttccttgaagatgaaggctttggtgtctagctcgtgcctgctgtcaagcgcctgtggtcgtcgccctagtcttccgctgtttttcgtttgtctttgtgtgctgggccttcgctgcccgtgtaataattctatttacgcttccgcttgttaaactctgaattgtatcagcttttggtgtaccttgcctcctgggacaaggattaatgcacgcacgtcaggaacgcccgttgggttatttccggtcgtgacaagttggtatcagagccacccttgaccctaggacgagccgtagatcccaagccttagctatattttcaaaaataaaaatctttggttatttgtgaaaattgtctagtctctctctgccttgctgcttcatttatcgccaaaatctgatcttttaaatgttgttttctttttgtttttgtttgtagatggccggcagcgtcacccgtcgtggtttgcacatgactggcttcgtcttggagctgcggggcatgtgcgtggtcttggggtatccacatggagtggattaccaggccaggccgctcccggagcaggagggtgaggatgcagagccccacgctggttgggaggtcactgcagtgatcctctctggctctcccgagcggacttcgctggcagtcaccgcgggtggagattccttccccgccgcttgccagaacgccgccctcctcgccatcggcaccctgcaccagcgct

SEQ ID NO: 50374 - DNA, 692 bp, Oryza sativa
aagagcactagtggcgaaagataaagggcaaatgttatatccaattccgtctgcatcgcctttgattttagcctgaaagaactaataatttcactgtgatatgattcacaatctgaaaatgaaagagctaatatcactcatcatatgctttaattttcagtaacctactccctcctctcattcctttaatctaatgttatactcattcagtgatccagctctttcagcaatctgtaaagaaaagagatcttcaaacgagtagattaacaaaagcgtaaagtgtctagagtttttggaggcgtcaccctaaggtggccgtttttcttttcttttggggggcgttagctgcggctagcaccctgctcgactgtctaaggtcgattctgtaaccttcgtgacaccctctttcttcttaatacaatttgggcgacctctttcggctgtcccggcaaatctgtaaagaaaaacaggacctctttttaccttataaagagaaaccaatccactaagctggaaacgcaataacttttaacactgccatctaactccattggcatgtttgtcttgtagatggctatgagctgcatgcggctccattctgagatggcccttcagacatcacgagcactggaatcggcggatcacagcaagaccagcagcagcagcagcagcagcaggtctctctaccttct

SEQ ID NO: 50375 - DNA, 701 bp, Oryza sativa
tgaaggaaaaagtacttctgaggtttatttttttcagttagtggatgttttaggtaaggtgaatgatagtcttcagataccctgtatgtctttgttacttcattcctatgaacgacaaacagggtgccatgtatgtttactaactttcagcatgggcttatattatgggtgtctattcagcgtataattggcatgcagcgattgatcaaataatcttcaacgtgtcttttcttttcttttctttcatcctttaattctctgtgctttcttcaaggcaatgtttgttgacaaatttttgcgttggaaaacattccctctatgttgtctgagatggattcttcactatgctgtctttgaattgccaccaaattcaggcatagaaacacagaagcaaaggacatcgagcttccttggtacactgcaaactttagtcagtgtttggtccaagaaagagtttgtccaggcatactcagtggagcaacaagcttgtatcctttgaggcactcaaaactgtattacattacacactttttatttgcaaattatcatttgacttgttccccttaaacaacactcagacatcactgcagcaattgggttgtgtttggagaagatgtcaaaaagagaattagaaacaactaaagatgtattgaacaatattcttgaaggtgtaagctgtgagtatcccccccccacccccc

SEQ ID NO: 50376 - DNA, 1400 bp, Oryza sativa
tcaatctgaacagcccaaaatcaagaggaaagttctgatcgtttcaacgaggaagagcccaaaatcaagaggaaagttctgatcgtttcaacgaggaagaggacaaaagcaggcttttcccccaataatctgggagtaaaagcaggcttttctcccaagatgcagatcagatcgcaccaataattagcgcgcgaatattcctatcgtcccgcgccgtgaaagcgtcgccgcagcctcctgcaagctgtggcgccagccagccaggcatcagcagcgccgcctcgggtcggactcggacgtgagatcgcctcggcaccgttgcagctggccagccagctaccaccgacggcctaccagatcgatcccctccgaaatcgcggtcgcgtcgccgtcatcccgctcacgtacgccgccgccgtatcgctgtcgccggcaataaagcgcggggccggcgcttgcccatgccctctccgaaagggcccggtgatacagcgatgcctgcatccgcatggcacgcgcggcaactacccactccctccggctaccacatacgatccgtgccaatctctcgtcgcactacagtcagcggcggcgttcgttaattacttcgttttcctggagcgaaaacgttttccgtggcgcaggttgcagcccttgtggctgtcgctcggggtattcggaaattggagcccttttcatgcatcgcttctgaaaaaccgataaataaaacgatgccgggggatgtggccatcgtgtgcgtataatggactggtggcgacgtgcaagtaaaacgacggcttgactttctgactttatccaatggcgtgtgattattgttaatcaccctcctgagtcctgaccaagaggtaatcgtggtactacatgcagtactagcgctactgttgccaagaagtttcagtgcagaggcaaatacggatcgattggattattctttagccgggtggacgaaccgagtgatttgtcaaggcgctcaaggtgcctttttaacccaataaaaaaatctgtactttctgatcttcaattaagatatggatcggagtaagttggatcaacagcaatgtgacggatcgtgccgtatctccatgcttgcggcccggcactgtggacggttggtaagatgcacgcagattatctacttatctgatgatgccaggaggatgcgatctccacgcccatgacgccagccgagaaaagtgcatacggccaaggccgcccttttcgcgctggtctcgaatgaacaactcggatgatgagaaacccctgcgcgttttcttattgtttccgctgagcaggttgccggggctgatctgacctctccgcaaatattaatccgtgtctccatcgaatggggaattatagaacttgaagtgtgatgcgca

SEQ ID NO: 50377 - DNA, 743 bp, Oryza sativa
cgcagaaatatcctctcgtttgtttaaaaacgttcatccaaacggttatgaaaatttttgacaacactcacacaacatatctatacaactccacaaaatcttaggttcaaactcatctcatactccgacatatatatatatatatataaaaagataaattcagcgtatgaataataggctaatttaaacttaatttttagtggaccgatggatatctctatactctacattgtcaattttcttttagaatttttcacaactatttacatcaagtttgaaagaaaaaggtatacgaggggacatccccttgagggattagaatccactccccttgcaaggttgctaagcctgcgaccatacatatgtatcatgtatccattttaattgtacttaattcggttagagattgagaattttagaatatgcaaatgtttttatcagcagaattccatagataaaaatatggcatttatgttcatgcatataactttaaggtatgggaagtcctggccttagcttgaaaagccaattgttataaagtttacatcacaaatacctgcatgaatgaatcctaaaggtaagacaccagcaaactttccgttggaggtaggccatcaggaccttcggccaacttgctaaaacaacaacagtaacaagtgaaggagcttggggaaggggcatacgacgaagcttaggccatggagcaaggccacaccacgaagcgaagcaccgggtggcgaaac

SEQ ID NO: 50378 - DNA, 568 bp, Oryza sativa
tggaagcaggcctccaggctcaaggagcaggtctcccgccaggtgacgctctcccatccccctcgatctctttgaactcctgtgttagtacggttctcgatcgatccgagtttgtgattgcgcaaccggggtgggtcgatgtcgatccctctcaggtgtctgtcttgttcgatccggtctctatataagtttgatttgatgtctatgctgatgggttttgagaggctaccgtactcgtctatggttaggcgtctcaggttgattttcattcatgctggcgagtggtgaaatgaattgtgagggggaggtccaagcttttgctctcgaaaaaaacaattgtgagggttgggaccgcgatgcgcgtgtttgcaatccctgagatgagaaacatcaggttatgattttacgacagggttgatcaatctggttaagctattagcaacctgtggcttttctatttaaaagcgttgctcgtgattcctgttcgaaatatagaaccatgtaaacatgacctacccgaatttgctgttttgagtaataccgccttgattattttcatccatcttgc

SEQ ID NO: 50379 - DNA, 745 bp, Oryza sativa
aaaagaacgggacctaaccacttgttagtaatatgtaagttctatccttcaaccttcagacttcattcataatttatatgaaaataacgtgtcctatagcgaagggaagaagaagaaatacgagccgatcaacgctgaacttttcttttatcgcatcatatatgcatgaacaaggcccatgttgctgattttgtaccaccgaaccgaatagtattaatcatatgtttgtgagtttgtttgttggagtggatctaaattcaagagacattatttaataggggacatttgcacatgttgtgtcctatggcttaatagaatgacatttttttaacaacactccaattaaatcttatatgcacgtactatacaaggtagcacactaagttcggtatgggcccagctgcaaaagagcgaggagtaccacttcccaaaatcgcattgagatgatcttgagaaacatctcgatctcctacaacctctcataatcgatgctttgatctcgattcctctgtcgccttgcccctactaactaccggattcattcattggactcaacagctctagaacgctagtgcatttgctcgctcacaccatctaagggggacaaagaagaagagttccatccaatgccacttcacgttgcacgaatagatccgggcacaaacatctccaatccaatggtactttggccctagataaaacattgctccctaaccatttctggcacctccagcgagcccttcgt

SEQ ID NO: 50380 - DNA, 540 bp, Oryza sativa
ctgtacagagaagcaaatcaatgattacacaaatttataactgaagttgcacagatttgaaaatgcaactacaacaaccagggagtgcaatacgtcgccgaatgtatatgcagtttacacaaaacaaatgcaagcccagtccagtcctgaaaaatatggtgtgctagtacgaagcatcatttgctatccgtcggtactcaggcatgtgctgggtgaaagtgaaccaagaaacacagagaaacatttcagaaagcagagttgtctctcttcgcctcccatgcaaaattttgaacaagcaataatctatagaaatatagcagtgtcactgtcttcagtcagggagttcatttcgtgatctctgagccaaataagatcgctgaaacctttcaaaacatctctctctctctctctctctctctctctctctctctctctctttctctctctctcattagacaagtacacagttcatcactaaatctgctgcttgcatatcacatatacagaacgaattgtgcatgttcagaacacaaggaaata

SEQ ID NO: 50381 - DNA, 1306 bp, Oryza sativa
cactatatttgccattgcaacaaactgttcttgaagggtttttaattcaggtggcagctactcctgcctcgtgcgaaacaaaattcagggggcgcccagcaaaatttaattaggaggttcaaacattacaacagattactggtgtacagggtctaaactcaataacatagtattcagtagaattattgtctagaaaactcaatgaatgttagggattttatcttatcaccttatttgaataaaacaaatttatcggttattatatgtcttaccacagggataggcaggagctgtagcttagatgtaaattctttctattattaaaaaaactaacaaggtatattacttgttctgggaggtaacttgcagtgccattttactctgaaagcatctcaatatctcatgtgatcgtttcggagatttggagaaaggaacaattattgtgataaccacttacaaacatgcctagaaacatcagtacacagtgcgcttgatcaaccagactaacagagttcttccgataaacgaggaagtaggccaacgtagagctctcccgagttccgacagagacgacacctatatatcgaagttcataaccacgctatccatgtgaaaacaattctttttttttttctggcgatggcgctcgtcaaaacagataagaaatatatataaaaaaacataggcaatataagttatcctaaagagtaataaagtatgaagaaatataggattaaatttacgtgacatatgaagaaaaatatttatttacagttgattttcttctttatatattcctctatatgtcggtaacattgcttgtttgtgaaagaatttgtcataggataaatttattcatttttaatatcttttataacgttgtggaccgcatacaataaacaacagatgctctagttgggggctttataatccatttctttgtccatacaagctatgcatgcatacacctgacatatgcatctacctatttatatgttggtatattagatatgggatatctcagatacataaagatacgtgatatgggacttctcctacatgatgtacacacatactttcatgtaaagtaaattacatcaccattccttaaagttgcaacgtgatatcactttgtccacgatcttgtaaatcgtatatcttggacttggttttgatgtatcatggtaggtccattgtacgtttcccacatggatgttcaccttggatgcaaatttgcattcagctccttcatgcacattcgctatgtgtctcctcgaaatatcctctcttctcttctgtatctatt

SEQ ID NO: 50382 - DNA, 751 bp, Oryza sativa
aaagggtcaacgccacatccgttggcgctgaacccgtggccacgtggatccgaagctgatctatttgtcgatgtggcatgaggtcaacgccaactctattgtagcatggtggtgtggcctctgtgcatgcaagcttgaggtaacaagtttgactcccttgagcagcataaattatctatttttattgcaacttttttaccgtcattttcttccggaccgatatacttcaaaaataaatataatacttccattatctttcttcccacgttactatttccgacatatatactccaatggtacattcaaatatgtagtatacttcttcttttttaccgtccttttcttccggaccgatatacttcaaaaataaatataatacttccattatctttcttcccacgttactatttccgacatatatactccaatggtaccttcaaatatgtagtatacttcttaccgtccttttcttctggaccaatacttcaaaaataaatataatacttccatcattttttcccacgttactatttctaacatatatactccaatggtacattcaaatatatactcccttcattccaaaatataagtcacaaccacccttaatcaaataccaagaaataattgttatcatatcatagtttagattatcctaataaataaaatgtatccacccaataaaattagatatcttaatcgtggatgatttaaataataatattttagtgaaaaagagggggctgcagga

SEQ ID NO: 50383 - DNA, 1083 bp, Oryza sativa
cataaaccaacacggagtacaccacgtacacgtacgcatgtctgaaacgtcagacggattcaataatagcagcgcgatgccgagaaattgtttgcgtgctcgatccaccaatcagcactacggtgccgagaatcgcaagctgggcagcagtagttttagctagaatttcatctacgaatacattataatatagatttatacatagcgcttctagttccatccatccttctctaggaatgaaatgaatagcatgcagtttcgcaccgatcatatcctaaagctagtgtgcgcgtacgtccgtagtggtgcagcgctcgtctgacgtttgcgagctcaatcagtccggccgtttgcgcttggtcggtccggcgagttgtggagccaggcgtggccagattggctcggccggcgagaggagctaagctcgcttttctagacacgtctagttggcttacatagtcaccaacgagaccgtgggcatcgatcaggcggcaccgatctaggatagcccgcaaagccccaacgcgctcgcacgagctgtgcgccaccgcgcgcctcaggcctcatgcgtgtctcggttcttttacgcgagaagacgtagtttggacgcctcgcgcgcgcgcggcacatgcacgcgcgggcgaagccgcgggcgggtggtgtgggtgtagcagcctggacggggcgggcaacgcgtgagagtaggtaggctggcagcaggggcggagtatgggtgtgggctgtggcgtgccggtgccctgcgactctgcgagtgcagcagggttacgtgaccgggggcgtgcggtagtgtaacagcggggaaacgtccgggcactgttttatcgatcatcgatgatgctgtgggtgtgcccggtcgacggagtagaggccacgcgcgcgcgcgcccgtgaatcgaggcgtggagcactgtccagtgtccgcagcgctgcacgacgggcttcatcttgcaagccagccgccgacgccatccccccttcgatccggtcttccccccttccgtgccaaattgccaataatccactttagattgtactgctccctccatctctaaaataagggatt

SEQ ID NO: 50384 - DNA, 1494 bp, Oryza sativa
gaatcgcacactaactaggcctaaatctagcaaccgccccgcaagcagagcagctactctactcattccaatgttgactatcgcggctacttcccgagaacgcctaatcatatcccgcagggggcagcatcgcgagctactgccagatcacaatatcacatcagtgagctaggcactagcagccaagtagcagaaaccccgtaatgctcaagccacagcaagggagggagcaagaaaaacaaggtgaaggcgacgagtctacctaccctacaggccgaggcggaggcgcgcttctggaagcgggagccgccctgcagtgcccgccacggcgcgacggccgagcttggagacggccgccatggcggtcgatatatgtgtcggttaactatcgagggggaggacgagtagggggttcccgtcttcctaagatgcgccgtggaggttccgttccgtgagcagcagcggcggccggcagcccgccctccccacgacggcacgatctggcaggtttttgggcgatatcgtagaggacggtggcttttccttttggccccctcccttcctttcctcgttttcccttttcccacacggttgaggggagagagagccggagaggagaccgttgattcccttgtccccactccccacgtcgctctcgctggttgctccttgccgtgcgtttttgcgcgatgcccctctgcttttcggtgtattgcgagcactaaacatacggaggcacggagtagtggatcatcattgggttgggtattcttgtttgcacaggagttgaggtctcagactggagtgactgacagactcacggcggccagactggtgccttcagaattcaggaagcagggattaccactagcggcacgagggatttgatgatgagattaagatgggaatttaatttttaatcccaatatcttgtttggtagaggtgatgaaaattgataaggaatttagttagagattatgtcattaataaaaacggatggctgagatttgcttaaacaaagtgaaggaggaattccctcccaattaactgcccctacccaggtattgaaaagaaaggagttccttcctcaattctccatcctcatcccaccaaaattttcatgtctcccaaacaaacaaaactcttaatagtctcatccctctaaatttccaatccctcctaaaaactttctccaaccaaacggaccgtagggggttaggcgtggatgatgatgcgtggttgtgtttaggaattttgtttgggagaaagagggaagattcatcttgatgtgactggcagttacagtcccttagtggtaaagcaattgctaattggatttttctgagaggttacgtgaacttactcgatcggtatatgtttactaggcgtgctgccttaagcggtgccatttgcttaattagctagctcttgtggctggctgtatgcctgtatatgttttcttgtactgtcgatctgtaaatggtcggggctgc

SEQ ID NO: 50385 - DNA, 836 bp, Oryza sativa
attttttcacacttacacgtgctcattggggggggggagcagcaaaaaccgacacctttgtgaatagataggtgccggttctatataaaaaccaacacgtaaaatattagtattggtttattcaaaagaaccagaacctataatatattatagggtctggtttttaagaaccaacacctacaatcatataggtgtcagaattttaaataaacagacacctattaaaaaaattggtcggagccgactgaaccgaccaaccttatctactcccactcctagtcatccttatcatccacactgctaccccactcctgtccctcctccttcctactctctcctcctccacactaccggcccactcccacccgtcctcaccgccgcctccccccacatgcttctgctacgctcctcctttctcccactcttactctccctgtcgagggatccaggtgatggcagcgcgaatacacgatgacagcgaggacgacggtggcacgacagcacgatgacggtggctacgcgacggcgctggcgccctcccctctgccagatccgacgaaaagggaggcgacgggctccccaagccgtccgcctcatccctgccgtcctcgtcaccgatggccacgtcatccccgttgtccatgttgtggatccacctatggacattgctcatcactgcgggttgtggtcgttgcctgaccccctccttggttctagctcaatgggcgctggatttggtgaccctggtactaggcgtagacctctcctagcagacagaggtaatgtcctcatcggcaatagcgacgatgatgatagtagcccgtgtcatgcccact

SEQ ID NO: 50386 - DNA, 612 bp, Oryza sativa
acatgtagcagctcattctccagttctatacagttgataattcataagtggaaaggtttgagctattggagaacaacatcatgtgtgatgattcctatgctcgtttcagcttccatccatccatcaaaactcaacgatggctgagattattcagcgcaaagtttagattttggatgaaattagagatgatgtgactgaaaagttacatgtgtatgacatattgatgtgatggaaaatgactgaagtttggatccaaactttggatctaaacacagccatgaagtacagtatatggctggctgactgctgtatgacctccagcccttcctttccatttattcctccgttgcaattcattccgtctggccgttgggtgctaaacccaccagtagcatggcaaattctggccaagggacatagcaacagaaactaacacggaattgcttattgcaggacgcatccctctccctctattcccaaatgagtacctcctgaccatgtggacgccatataatgataggtgctacacgaaagctaggcacttgcttaccacggccgcaatgattaacggattagcatgcactcgaacggcgaaacacgcagttcctcact

SEQ ID NO: 50387 - DNA, 632 bp, Oryza sativa
ataaaatataatcactttacgatttaagcagtatgacaccacacatatggaaacactctaagaacgtaaagaaaatactattaggcaacacccctataaatttaatatttttgggtagataatggggagaggaggcaaatgtgtgtatcagtgtatagaaatattgcactggagttacggtgggttatgggaatgaaaaatggcttcggaagttcagccttaacgaggggtttttgatttccagttggagcattggaggatgagcttaggttaagtttcccttagcaactagagaggaggcagaaggggatgacaaggcagaggagccatacgagagatgtcttgggtggctaagcgtcaactagtaaaacgacgaggacagcttgaggtgagcaggatcatcgaggaacgatatgaattcagctagtcaatgtgttggtggtggcgtgacggaatgacgcatgcaaagtgcctgaccaatgatctagagtgttttaaggtggcgatgggtcgatggcgaggccaacatttataggcgacgagggttaaaacacgggtcctatataagcgacgaggatgatggcgacgccgatagcatggaagcaatgctcaaggtgaactcttggccacgg

SEQ ID NO: 50388 - DNA, 760 bp, Oryza sativa
ccaagccaatctgtaaatgcatataggtatttttagaaggatggacgtatatatacattgattaataccaaatcctcagcacatgaataattgaatacagcaacagagccctggcaaagattgaactggaagcaaacccacccatcccgagcaaaatccaatttgaacctttccacaatccgcactcacatttcaaaaaagacgccatttatgatttacctccaaaagaagagaggcatcagtgcctcctggccccaccaagtgtcccccccggccactaatccctcgcttacttttacccaaaccccatccgttcaatcgtccggcccagcccacccccgtcacgcacactaatcgcgaggcggcccggcgaggcggggcggggtagaccggaaacacgcaaacgctcccgcgcgcggcgcccaaagtctggctgtctgggggtggctacggttaccaccactgccccatttcacatttcacccctctcttttggcttcttcgaaaagagggcgtatacaaaaagggagagtgatatcagacagatgagattacgaagtggcaagataggatttaaaaaaggctaaaaaacaacttaaaaaatcaaagatagaaagcagtaagcaccaagggcagaaaaagaaaagaagaaaagaggaaagatttggaagggagggaaaaggaattggggaggagtaaaatgggagaaaggtgagggtcgaggggaaactggcgcatttgttgtgggcacggactttgg

SEQ ID NO: 50389 - DNA, 673 bp, Oryza sativa
aatgctcgacctatttagagacggagggggtacaaaagatagctctaaaagcaacaactagatgtccatgaaccatgttagctctggcttttggaggcctactatttaccacattaaatcagcaaaaaaaaaagagaaatgtattcgatgtatggccttagtgggtccagaagctataatttatacaaattacaatttatctattatatactaaaagtccatgaaactttctacaaacgctctcaagccaccacgtggcgctctaataaaatagagaaaatcctataaattctaagaaaaaagcataacatatatcccttaatttttatttaaattggtgggtccaatattatacaccattagataaaattgatcctaaaacaaactaaataccatgggtcccacctatcctctcctcccgtgcattggcaggtggagtatataccgtaccctccccccctttttttcctttcttcttcttttttccatttatatatataatggatatattttttaaataatgataattttacaaacaaagaatctaccatcatataacttaagccggtgtactttttactctgtactattattttcaaataatgcactattttaaaataaactctacacaattatatcgcgtcatatcaaataaacaatatctatattaact

SEQ ID NO: 50390 - DNA, 815 bp, Oryza sativa
gtcactctgggtctttaggcggcattgactttggttctgtcctagtcagcgtaggacccacgcggaccccacatatcagtgacacctcaccttcttcttccccttaccacctctcccccatcatcacggcgcgagcagcggccggcgcgtgcgactgtcgccgtctcgtccatcccactgtcgcgtcactctttcctcctcttcggctccctcctcttccccctccggtccacctctttctctctctttctcttcccctccatcgtcgggcaccattgccgcccccctgtgtcgtcatcgttggcggtagggatgagctacttcggtagctactccacctacctcgaaaccatcttctccgtcgtgctcccgccgctcgactcgattgcctgactaatttctgccattgttttcatgcagtcagagctcgtcatcccatcggcgctaacaacgttgttctacgtctccaacatcgtctaatttgccaaggtcatcatcttgagacgctgttgtagtcaatgggcatcgacgggaagcggacgtactacatcctcaccgtagtacaaaaaacggaccggcccagcggttgaaccgagaaaaacggaaccatcactctcaccaggtcagtttgttttaaggaccgcacatgcaatggaaccggtgcaaaccggatgaaccggatggtttttgaggaaaaacggcggccctggctattttgaaccgccggttcgtgaagcagatggctagattctaaggcccacttggattgttgcggcccaattatcttttatttgcctaaaatgaggaaaaagtgc

SEQ ID NO: 50391 - DNA, 660 bp, Oryza sativa
cccacctgccgacaccgtcgagcagcgcgtgtccgtacccaaccaatccagtcacgccacgtattatccgtgacgcgtccagccggccgccaggtcggatgacgactcggcggcaggtacgcctcgcggaccgcgcccgttcggctgacacgcgggccgctgctgctcagatgcgttgcgtgttgaggcgacgtgctgggtccgggccacccacgtcggcttttttaactttgcccgcgccgcgagagaaggcatcgtcgtcgcgcccaaattgtctaaactgccccgctcggctcgtggcaccgcgcgcgaacggtggcccggttgggcgacccgagagccgatgcggtgtacccgccgctcggatgtatttttttttcctttcgtcaggaagggtattccggtaacttcgtgtgacaatggaaacgattagtcaattttggcgattcccgcgacccgctccagcatacgggcgtccgacgaagaagccacgcgacgcgagtgccgccgcggcaacgcgtggaagcgggccggcgaaggagggaaacatttgaactgtgctaatctctctaataatggctgcgaatttctactcaatactattctcatttacgctaacgtggcatttcaatcttctaaaaataaaagattaagtatttc

SEQ ID NO: 50392 - DNA, 728 bp, Oryza sativa
tttaggaatgggatggtatgtggggtgatcctacgttattaagggatcgaccgggtgcggcccacatgttagtgagagagaggggtggattggattagtccaccacttaggtgtgatcatatggaatattttcttttggggaccatctatcccacccatgctcaaacaaaacacctacaaacaccctgacggtccagcatgatccatcaaatccatcgaactaggtgtgtatcgcatgataacataatatagagatacaaccaggcccacatgttagtgagaaagaagggtgggttggattactccaccacttcttgaggtgtgttcgtagggaatattttcttttggggaccatctcatcccacccatcctcaaacaaaatacccttgcaatccaacacgacccatcccatccatcgaaccaagtatgtatcgcgtgataacataatgtagagatgcagctctaacccacatgttagtgagagagagagggggacggattggattagctcaccactacttaacgtgtgtttgtaaggaatattttcttttggggaccatctcatctcacccaccctcaaacaccctgacggtccaagacgatccaccccatctatcgaaccatgtgagtattgtgtgatgacataatacggagttgcagccagccgtgaggcacatatgctttgtacacgacgagacgatggttaggggatcaaacgagacggacgg

SEQ ID NO: 50393 - DNA, 743 bp, Oryza sativa
cccgttcaagaagagcagacggaatcggtgtaaaagtgaaagggaaaacgccaaaggtgcaaaacgaagtactagtatcgacatgttgcagagttagcagtgcattagattatcagtttagcacccaccacttcttgcaggtttaatcagtgtcggatggtccacttgggacagggccagtcggcagagccttatcgaaatggttgtgtgctttgggcctcacaaactgaccgaattaatgaaagcaatgcgacaacagcaaaaaacaccatgatcactgatcgagggggtgttgcgagaatcgaactcgcgacctctcgcacccgaagcgagaatcataccactagaccaaacacccagtttgattacttctttatcttgtattttcaaatcctaatacaatgtagcatgagtctgcagtgctcgcaggccgcagcttggtgtattcagagcccgggaatattttgagctccaatatatacagagtacagacgaagcagaagacggtacaaactactacaaaacagtgaacagcgacgtctttatgcatatcatgcgtcttctccggaacacgcatgcatacctccccgaacggaaaatgaaattgatgacacgagtaaaacctaaaaagagttgcatcacccacagcaaccactccgtgccgatgtgtcatgcagcacatacgcctcgcctcatggagtgacttcatcgctgatttgcttgggacctaccgatccaatcga

SEQ ID NO: 50394 - DNA, 532 bp, Oryza sativa
ttgaccacacacatctctgtagcatatcgcatcgccacaccggcaggcacaacgccttcagcgcagtaggaaagggacgtgagcatggtaagtggatatgtacgcatcaatttggcacctaagctccccggcctactactggtaactggtaagtggtaaccggttgcacctcacacggctcgacagcgaaaagattcaaaagcctaataagatcggtgccgactggatctttgacagccacgaacactactcgattgtgcccacgcaccgcagcccaccgcaaaggcccaaaccgaacggcctcgcgcggcgcgacgtcgcgtgctctcggcgcggcggtggcccgcgtggggcgccgcctccgacccgccgcgccattcctgtgagttccccatacggccataccccatacgcggtgaagggaacaccgaacacgtcaactcggagcccatgcatgcggacgcagatgcgtaggccctcgacgccttaaaagtttttaagcaaatctatggatatccaccgtcaatcacgt

SEQ ID NO: 50395 - DNA, 1243 bp, Oryza sativa
gttttttaaaaaaagtggatagaaaagttattttaaaaaattgttaatttattttttaaaaatttaaaataataactacttaattaattatatgctaacggtggatctaattttgtccattttcttaaatttttatccccttctttcaaacacatccttaaaaaacaagaggagttactgtagtaaattattaaaatatcgtgtgctttgctagcagcttcttatctttgattatgggtaaatgttttgtcaacaccatattccaccttctttattgcgatcgaatagctttacctcttactcctctttttcatggactttgacaaacgcttcgaaatggtgattgctgcagaactgacgcaacatctctaaactaccctgaaatttcccaggaaaacagcccgtgccaaagctgaaaatgagctggaaaaagacgagtttggcaattctataccgccttgtttacgttttcattccgtcggtgcttcttcaccagtcaagtcgttcacttcttcctccaaaaaggaacatcagatggaaaatcaagtacgatgatctggtcaattgtactattaaattaataatacaacgaccttatccattattatcccatagcattattcttaggactcattccactaaaagtcctgctacaattgtaccgcatgtactattaataatagaatcttttagaggttctctcctatctttaagagatacaatacatcctcaccacctcaccaccaatatccctttagactgtctccaacaacgcgacgcatactcatttatccgtcgtgcacagtgattttgggtaaaaaaaaacagcctccaacgggagaggcaaatgcgatacgcatattgggtagcggccaaagcgctaggcaaatatacgtctcctctctccaccgaacactggagcggagctcgcgcagtcgcgcggtgggccagggtgaggcagagctggtgcggtgaggcggagctcccgcggcggggcggaggtggcgcggcggggcgggagcgccgtcggggagcaccgtcggggagcgtcgtcggagcgcgccgtcggggaggaggcgtagtgggcccgtagtggcgttagggcggagtgcggccgacggggagagtccgcggcggagcgcggtcgtcgcagttcccgctgctccgttctgagcatcgccgccacgaggacgagccgtgccgcgagccgccggtgggtgtgctccgcctgccaccaccgctc

SEQ ID NO: 50396 - DNA, 1201 bp, Oryza sativa
ggtttaattatattgccaatttgtggtagtgataatagtacacaacaagttgatgaatgacatggtgttcaacaacacagtacatggcacatgtttttcacccggtcatatatagtatattatcacaatcaatatgtatgcaaatgtctgcgtcggaatctgctaagtacatcctgcgttccgatataactagtgtatatatagtcgcgcattcatgcgactttaacctttctctatgctaaatatctctacatatattatttatatggaaagcggttcagttttcttttggttttaatctttcacttagtatatctcatatttttaataggtggcttttaggggttgacaagaaaaatagtaaactgatatttgtcggagcttcggccatttgttgggctctatagttgagtagaaatgatatggtttttgacaaatcaccatctattttctttataaaggtaatttttagggcaactcattggctccggttttaggtacaattacaaaggtgtgatgaagatggagaatttctgaaagttgcatgtcgtaagttggagacgtcggttatgcaactttttgccaactatagatggagattcacaaataggcttgaataaatgtgatcttcttattttggattttcctatttaaatgtttggtgtgttctattttatttgaactacacttttatctcgagtgctactttataataattggttgtagctcttcttgagcaaaggttgagatattatattgcattatctaaaaaaatataatatttgtagtaataaattatatttactatatgccttaaccttcctctatattgaatgcttttatatgctagttgaactaattaattatattgtttatagatacactaataaggaggtggatttgtgatctatttagtataaattgaggattcatttgtttttaacactaaaccaatatccattcacttgctcatgattcatcttaattcttacttatgtttagttagttaacctataaaattttgtaagttttgttttattttattaaaattttaggtaatctaaattcataatttttcagttcagaagatctgctcattgccaaaaaaaattgagatggttaatttttgtgctgaacaaaactggagatcgatagtttatactccctccgtcccttaatataagggattttgatattttgc

SEQ ID NO: 50397 - DNA, 9999 bp, Oryza sativa
ctccaaacttccaaaattctaaaaacaatgagtttttattgtacgtaaggtacatttaaaaggttaccagtcctgaaaactcaaaacctccagtgttatgtagcaccatccttgccactctcccattggatggctgagattcattctactgtttttgtccttttaccaatcctatgctcattatttactacattatgtggctctttatgcttgcattatcagattgtctttcacttgttaagattgttaccggtgaccagtattgttgtaactttgagaccactattatttttaattaattagattatgatgcaagaaattttaatagtatgcaatatacttcaataagatgacatctatttgtgtatttagatttttgaagaaaattgtgaatggttaaagattaactgtgaataccctgcaaaaaagtttaaatatgaatagtggttagtgataagtactaactctatcctaaaatatgagaaattttagagttgaacacgggtattaacaaagtaggtgaaattaaatgggggagttatgtgattgtatgagaagaggagtataagaagaatttgaagggtggaagattgttattggttgagaagagaatgtataggtggagaagttgttatattttgggataaatattaaatgttagaagttgttaaatattttaggatggagtgagtagtatacaaagcagtagtggaagtatatatatgatcataccgagaagaaaactaagctacacatagtgttttcttttttgagagggcacatagtgttttttctttaaaaaaaaactcattagatacacgtagttaacagcgacacaaaagagaaaaaaaataaatgtcactagccagatcgatcggtcggtcgtttccacacgtgcgcgcgtgcggcccggccacttgcgcgacgatgtgcgtgtgaacatggaaattaatcgctaatataaacgagtttctagctagccttcgcgctcgagccacactgtcgtgaagaaaaaacggttttaatttcgtagtaggttcatataaaaacttactctaacaataatatttctcacgtgaaaggtaaggaccacgtgccataattaaatcatgctaatgaataatttgtacacacgactgacttgtagtagtactgaactagctactactccagctaggaatagagtactggatagctactgcgtgaatatgtacgcgtcgatcgtcttgtgatgactaccaggtcgtctgttgactgatcgatctatagatagatagatacagtttgtttttgacggtcaatgtatacgtgcaaaacgccgaagaagctagtggactggtggttaaacttgaacaagcacgttgcttaattaattactccgtccgttcacatatggtatcctcatcatcccgtaatgtatgaaactactgcagaaaggatcttcacaaacggccaaagctagttttcatatcagggagctccactcagaatgtttttttttacttttttagacttttttatgttttagttttattattagaccactcccaaaagtattttcgaaaactgaatcttttgattaggcgtgccagcgatgtcctgccacgtcatcagtggtggcgtgacaagaggctggcgtggctggtatgatagagttatttggccacaccaaggggctggcgtggccaaattaatacttttggaaatggtctattaataaaattaaaatataaaagtctaaaaaataaaaaaaaattcctccactctcaagtaataggtgtgagttgtctacgaaaatcggtattttaacgtgcgagcatcacatccggatgtaacaaataattttcacagatggacatcctaaggaggtcattataaagacccgatttttccaagtagccaaataaggaagcaattatttttttcaaaaaataaaaaaaataaaagaattccaaaaccctagccaggtcatcgtgaggccaccgccgcagtccacacgcctcagctcctccgcctccattttaactacgctgcccttccgcctcctctccgtcgcgctagagcctgcgagcaatggatccgccctccccccctccccccgggttgggggggaggggagatcagccgctcttaagcctaccgacggtgctgtggtcgtggactcgtggtcactgctcttggtgccacggtcaccactaccgccccaagcccgaagtccgccatcgccattcagagaggcaaggaggctagtcgacccattgggagagagagaagagtagagaggaaaagtagcagtgagtgaggggagtgagagtgggagtgggagtgcgaaggaggaaataaaagagaggaagagagggaatgcaaaggggagaggaaaagaacaaagatattaggatgggggagcgtgcaacaggtaggaggagaagagaaacccccttgtgaaaatcaatttcgtagacatatctcttaatcaagagatctgtctatcaaaatagctattttctcaaaggagcctagtaagaaactcgtctgcgaaaatcggttttgacaaacaggccttgatcgaacatcatcaatgaatttttcatatggatcacctttcaaaataaagagaggtgtccgaaaaaatacctttatagttgttgcaacgtgtcaaacagaaagaaacaaggaacagagggagtatgaagaatcattctaagttaatacgaaagtataacaacatctccaccatcaaattagttttatattaaataaaatattaagtatatttttatgatatatttattttacgtcgaaaatatttctatattttcttcaaacctgattaaatttgaaaataaaaaattgaaaatgtcttataatatataaaacagatagagtatgagttacggagacgtctaaataacaaattctagagttctaacaaactcgatcggtggaacgtgacatgttctagagctcagactattcgtcgcgacatatattttaatcttttttaccgcattgctatttgccagcgagatcgatcggactatacatcttccgagccatagctagaggtgctggttcggcaagtatgtttacatgcatgcttatgatgaatgcgtcgtattatatataaacacgagcctatacgtacgtatgtatacacgttagtattcacactgcaagtgtggacatattttagtatttcactactagagaaaccatcgtccaaaatccataatagtcccgatttgaataggaaccgggactaaagatgatttttaatcccgattaaaaactttttgatctttcatcccggttggtaacactaatcgagattaaagatcatttttagtcctggtttaaaaagttgttgggatgagtcagggctccaattatctttaatcccggttggtataaacaactgggactaaaatatcttttgtcccggttgcttatacaaaccaagaagttcaccccgatctgcgcgcctcgttcttgatcagtcgccgtcaatcttatcccctccttcttcctctctcctcccctcccattaaataattaacaccctcttatctccatctcagtcatctcccctctcctctcaccttcttcctcccccttcccctctcctccccctccccgcctcctttccaggcggccgagcccggtggcggcagttggcgcgtcgggccgcgcgaagcacggcggaccgcgcggagggcggatggggcggcggcgtggccgcgctggcgagcggatgggagggcggctagagccggcggccggcagcgccctcccctctaccaaaggggaggcgggaggaagcagccggcagcggcaactcgattttgtttttttttttgaatttttgatacattggatctgagaatttttagaagttgtcatccattggatatgtgatgtatttcttttagaatttgtatgtattttttttgagaatttgtgatgtgaatctatgtttgtgatgatactttgattttgatttgaggatatgattggggatacagggagcaactcgatttgtgcggttacaacttgatttgggaaaaaataataaaaaaaatagtgactaaccgggattggcgttgccaccaaccgggactaaagatgaatttttaatcccgattattttacccggtactaaagatttcccggatactcccgattacaaaactgagagtataggggttatcaaccgagagaaaaaacgctttctccaatagtgattttacactttcgtgtaccgccgaaaggacgatccaggtttcagatttaattcctccaaattaactctgtacgtccttctaaacttgattttctcgagctataaaattctcttccataccataattattgcgacaatctttaagtatctccattagtatttttcagccgtagttcatgcaaatgagatgcgatggcatgcgaactaagcaactggttatgttcgtggatcagattatatttgtccgtgacaaatactaagactattttttaccaaactacaaatactagaattaattagtattatttatgtcgactaattatccatttaatgataggcagtatattggatacacaagctttaacggatagggtgcgtattattgcgagtagaaagtgcgagagagattgaatgaaaagagcgaattgagtcaatgcggtacattttatagatggggaagggatgacaaccgtagatgcgatggttgggaccatcgcgtccgttgccaaggagcgccgagtgtaagaggcgtggttgccttatacagatgagatcaccatgtagtttcttaacacgtatgtttacatgcgtaagtgtatatgcgcgtctcgttcatactgtggtatatcttttaaaaaaagaaacggagaaaacttgcgcccttaggcagcaaacttggtagctagccatttgaacacacccctaaaatcctcatgcaagttatttgattatgagacgctatgaaaattttggccattatttcaacacccgaaatgctgtccagcttttggatacttatgatgcccatatccaatttttctgtgccaaaatattttgcaccaagtcgtcaattaaacattgataatcgatcgattaggataatactaatcgccaacccgtaaattacacaggctactgttatttatgttataaagatttaaaattttaatttgtgtgaaatacatcggttattataattaactttcatgttcggaggacaaatataactgtttcataactcaatggctgtcatattatgatccatttaatcaatggctagatgtgtacatgagaactcataggaaatatccaattagtatttggtatatagtacgaaggctaatcggtgcagccgcgctagaagcacacactcattatattttgatttttttagacactcgtactatctaagagcagacactcgcttaagcctataagcacacacttcaaaagaaaatctttacatacatgtgtactatctaaaagcgcatactcgctagtaacaatttttaagcaatttttctataaagtgatttatattagattgaaatttatctaaatgaacattttagaaagttatttttgatatattttgattttttttgaagacttactcaaatggagtacaatttttctaatataccatttcaactgaaaggtcatttcaaatttaaaaaatcgagtaaaacttctactaaaaatttgataccttttaactcctatatcagaaaaccctaatttttaaactttcaaataaaaacttacaaactttcaactcaaattaaaaagttttaactcatgagctaaaaaaacccaaattttaaaactctcaactcaaaattcgaaacatttaatacaaaatttaaaacttttaactcatattttaatacttttaagtcaagccaccagtagctaagttagttgagtcaatcttgtccaagtgtttacattaaatttattattcatctttcattaaatttctttctacatatagcgaaactcgatgcaataacatttaagctcttgtcagcaattctatttgatggatctgtaaaaaagtgtcaatactatactccaagaagtatgtaattttggtaaagtccatagtgatgactcataatttataaaaaaaatcatattgatttggttaagcatgtacgtacaggggtagtttttacaacaaaactaacaaaaaaataatttatacagtgaaatgtcaaagtgacttctggggtgattttttaattttcatcctacataattcacataatatttcaatatatatctccatcattttttataatatcctatatacctacatagttcatcatcacttaattaatgctatttttctattcttttattaagccatatcacttcaattgtttatagcacttagatgattgatttatgatccaaatatcacccttcttttattgtctcataagccatatcacctcaattgtttctaactcttatatgattaatctatgatccaaattatatcccttcttttcttctcccataaaaccacatcatcttactttcatatttgaatcatcattctatatagtatttaaattatcataaaccaaatcaacttatataagattatgttgtctagatattttacacattatttctatttgttattatcatactaaactcacacaacaacttatgtagtttcacatggtatatacagatgtgctaacattgcttataatctgaagagaccgagggtatgttatttttttctattttcttttgcaattaaattgaaggtgacaccgggaaattataggatcgaacacaagtaaccaaacctactagaaatggtaaatggtagattacgttagtggaagtcaaataatcgaatcttgatagttcaaaacacaacccaatcttaaaaaccaatggaacacctgtccagtggtatatccgacctactagagtcggtgtgaccgaggcctggccagtctgaccgcatatcctctcgcggtctgaccgtcagcctaaaaaacagcacgacaaaacttatgtaaaaactcgatttctcttaagccaactgttggatcgagttacaaacttaaataaataaactagacaaaccaagaaacaacgccaccagagcgatttgcaaacttatatatggtttaagagaaaacaccctctcgaaagtcggctgtcttaaaatttcagcaaatctgaacaaaacctaaaacttaagcaaattcgaatttagcaagatccaatcaacaaagtattagaaagattttggatgaattaacttcaacaaaatcgtagaaaattgaagaataataattccaaaaccgtttacgaaaccacgtctctcgtgatcgtggcctgctagccatctaacaaagctaccatgcacacatgtacagcacacatacatcatacatgcacgtactgcatgatacagtaccttcgctacaccagtttttcttaaccaatttcctccgtgaacatagtatccaatttcgtcaccagcatccttgatcatctggactcaactcctccttgagtctagtcccgatctcaccgttgatcgaagttgacctccaagaaccttaactctagttaccttctcacatggtatcccaaccgtactagaactttgctcctccccgcgcataatcccggtcctcactattgataagtcacatgcacacaatcagacaaaataaccatttctgtgctcagatatcacaacatgatcgacgcacattacccacactcaccaacatccatgcacagtacattctcaaaacaatttcatcgaataaatcatttgtaaagccaattgttcatcacaaatattaatcatgataataatttttaaaaaaatgcataagatcattgtcatatcttgtctcatcttgaaataatatccgtggttaattaattagtctttgcccctcctcctgtaactaacagctaacgcacgtttccaatgtgtttccaagctctattgtattcacactcagctatctgctgcatatgtgttgagatatggagtagtccattagcctatacagtcattagcattagccattaagcttgactaaccttagatttttgttaaggcgctttcacacacttatatacgccctatcacactgtcactattccccttgtgcatatgcggatgaaatggataaaaatggccgaagacatttctaaactgcacctcatattctccttgattgattattactaaaatgatcaacgagtttcactttacccgactagtcatatgcatggatgcctgcgttgaaacggaacattaaaaccggttcaattttttctacccttcatcgggattttggggggacatggtttattttgttttctcgcttggttagtttttgatcgaggcatcgtttttttcctcggttagttctttagagcaagttcaatagtatagcccactactagctctaatttatctatagccaatctaatagccaattcatacaatagttgcttactatactattgatatatggtcccacctgtcatacacacattccgtcttggagtccgtactgcagctggctataaatctgtagcccgctgctcttctctcttatccactggtggagaaaccatctttgctcggtagcccaaaatccacaatagtcctggttcgaataaaaaccgggactaaaagatgatttttagtcctggttaaaaactttttgaccttaaccgggactaaagatcatttttagtcccggtttaaaaagttgtcgggtcgagttaggccccaactcatttttagtcttggttggtataaacaaccggttatttataccaaccgggatcaaaaatcaaccgaaccgcgcaccagtccaccgtcctctcctctctcattaattatcccttatcccttcgatcccaccgtcctccatcccttcgctagctaccttatccctctcagccttagcctcctccatccattctcctttccccttcctcccccttctcctctcttcatcctccttccacgtgaggccgggcggcggcggcagggaggcgggcggccgagcaggcggcgggcagccgggcaggcggtgggcggccaggcgggcgaggcccgtgaggcgccgggcgggcgaggccagcaaggcccgcgaggcgccgggcggccaggcgggcgaggccggcgaggcccacgaggcgccgggcaggcgaggccagcgaggcccgcgaggcggcgggcggccgggcaggcgccgacggggccggcgaggcggcgctccccaggtgggcggcggtgctcccggggcagcggcgcttccggggcggcggcggagcccgaggcggccgggcgggaggccggtgaggcggcggacggccggcgctgatctctgtgatgttttttttcttgatctgtgtgatatgtgcggccgatttgtgcgatgtcgatttttttttcgatctgtgtgatgtgtgatgtgtgaatgaatttgtggagatgtttttgtgattttgtgaatgatttgcgatgtatttggggataaaaatacagcttgatgtatttggagattttgtgaatgatctgtgatgtatttggggataaaaatgcagcttgatgtatttgggaattttgggaaggatccgtggtgttaaaatgatttgtggataatatgaatggtggtgctcgaaaacatgaaagcaggaaaaaaaagaaaaaagaacattagtcccggttgttaactctaaccgggactaaatctttagtcccggtttttaacactaaccgggactaaagatccatctttagtcccggttatttcaaccgggactaaaaataggtatctttagtcccggattcatagtcccggttgtataaccggtactatagggggttgcgaaccggtattaaaaagggtttgtccaccagtgatcgtttatctcattaaaaatatatttatagctgctcttatgca

SEQ ID NO: 50398 - DNA, 684 bp, Oryza sativa
tttatatacgtgtatattttttatacgtcaatttgttgatacataaaaaaattatatatatgtatgtatatattttacatacatacatagaaattttatattgatacataaaaatacaaagtttctatgtgtatatataaaatatatacatacgtatatatacatgtagtagtactgttatagtaatagactaatagtagtagtgctagtagactagtagtagtactaatggactagtagtaggagcctgatcgcgcaggggttagggcgcgcgaccagtgggcctgtgggcggtgtccatggccgccggccaatctttgcacaaaccgtgacttcatgagggagatcgctatgttatggattcttcaggatcagcaccactagctctcgacatcatcaggcgcgggtcgcgcatgcagctcgtgctcgcccatctgccgtgtgccggcgagtagctagctagctagctgcctggctagctgggcagggtcgccgaaccttggaattggatctagctagctaccgctcaattggcagctatgagcttgtgattgtgtaaagacgatgtttcgtttttattttatttctggtcatttattccatgtgtacgatcgaggcgcgagtattttcgtgtaccaagtgatacacaaacagcgccgtacgtgttgacaacagatttaagct

SEQ ID NO: 50399 - DNA, 855 bp, Oryza sativa
ttgcctaaccccgactccgaacagttgaacacttgacctcacatatgtcccctgattaacgatttcattcattttcactacccaagcccccgtctcacctcattagcaatgctacacagtgccagataccgctcctaaacctagaggcttaacctcaccgggacactaagattgccctcgaagtctcgaactgctagggtaaatcgttcatcaatcatcttgtctgtgtatccataatatccataaaagggccaattcaacaagagaagaaccgatgaaattataagcacaaatggataaggcactggttactaacccatatgttgcagttgcacagactactgttattgattttataaatattgaaattttccagtaaactaattttctagtaaattatagcgcataaattaaaataagaatatactttacttcaattacagctttctagtaaactaatttcgaatttggaatacactaataaaatgctaaattccaagtccaacccggtataattaattttaaaattgttatgttttggaaaagactaatctaaacggtccatgctatcttggcgagaatacacttcctccatcccaaaatataagcaatattagcatagtgtcaagtgatacttttttactttaactatttatagaaaaaaaagatcaatcatataaaattgatgttattagatttatcttaaacaaactattataatatgaaaactctttttatttaaaatatcttatttttatatatattattgatcaaaatagcatatcgaagactgtatcgaagttaaaaatacttatattttaagacggagagagtagagcagacgtcctcatcata

SEQ ID NO: 50400 - DNA, 1430 bp, Oryza sativa
cttctgtgattaagatatagattttacatcagtttccgtatacatttttcaaactactaaatggtatggttcaaaaacattatatataaatgatgctctaaaatatcaaatagattcgtttttcaattatgttggtgataattaaatcttaattaatcatgtgctgatagctttctcattttacatgctctttatatttatcttactgaggttcaaatggaccttgttgtcaccaagtatcaattgcaccatgcattcattcaacttacacccctatcttaaaataaattaactcctaatcgactacgaatttgagcagctttgtctagattcgtcaggatttaaatatttttgcgatggatggactatgttgattggccctccattatcctttctctgagagttcaggtcatcttgagactgttgcacttcacactccgagagtacagaacggtactggtactgttctagcttgacctaactttggagacttgagcagcatcacgttcttggacagcagcttcacgtttttcagccgctatagcccttcaacatgtggaaaaaccttattcattctccagtcactccaataatagcacaaaaccccacaccaggttaaatgcaccagaatttcttctttgttaggagcagaccatgtgccatcaacaattcaataggtttcttgccaaacatcgatccatagcggttgccattcacttcttctctatgtataaatgaaaaaaaaaatctatgtagttaacaacagtatagtactaagaaatcctcaactggcttttagtttagataaacaaatcatggatagaaatattgagtgttcttttaggccgttcatacatccattgcacaattagaaaaactacttaatagtatcccgtggaacaggaatcaataaataacaattcgatctgatcaattccgtcctctctccgagcctttcccttctctcttcgagccttcatctttctaccctgcctctcctactttgcccctctttttcccctcccctcctctttgctggaaagagcttctctatacaggcttggcggcgacgaagtaggcccccaaaaatggacctagagatctaggccctcctcactactagatctgccccgagtgcatgttagctacaaggtcatgttgcctccttcttcgtctcatgcttttgaggcatgggcaaccatgggatctagttcccatgacggaagggcgcaaccaggaaggagagaggatgtcgggatgaatgccgaccagcgtgtacttctcgccctccttcttctaggcatgtggtcgatgtgatggagggccatgaccagtgaagattctgggtctagatcttccattggaagtgacacatattcctcatgttttgttctcaaaaaactagcacatacaaggctgtcactcatgtg

SEQ ID NO: 50401 - DNA, 4424 bp, Oryza sativa
ttaattaaggtgactacgcctgatacaaggagcctacctaattcacacactattcttgcctacctaatattatgagcaattttatatttcttgaggagataccatgatgtatcactgtttctattgtaaatttggtacctagatactataaaatttttgataccacataatatctcctcaacaacagtaaaattgctctaatatcatacaaggagctacctaatacaagtactgtactgcaaccacatgacaaaggacaacatgatttggaaacacaaaataactgttactgtagcaaccaaagaagtcaaaagcagtactgtcaaaattttggaaagcaaggaaaggaagcaggttaatggcatatttttatctatgtttggatagctgcggcctaacatagcacattgtccgctcctaacagagtgtgaattctggaatacgttacgtacattgagagagttttttcaattattgaatgagaaaagtccaatgtttaggccacaacttggcgcttctgaaaagcatagagctgctgtcacttgattcagggtacgatgccatgacacttcaccgtgattcactattgtatcgcccttcgcccccacaaatacttgtgataaaaacagagagagaatagatgggctagctaacttgggattggcctattctgggaggggaagaccagaacaggctgctttgtgccgggagtgctaataggcaagctggttgtgtgccagccatgacacatgatcgtgagcacccgcttacgcacatccacccaccacaataaatttcaatcaatttaataagttttataaaaagaaaatagtacctaaaagaaaaaagttactatatatacttaaatatattcgtgtacatgaggcacaaggatgaaggtagcatgatatgtatagcacataatcacaggttttattgtctaagagttttatgaagggtcaaatcaataaccttaatcaaataaatcaacagttataaatttcatataaactatattttataaattgaagtatataaatatctcatcaacatgtatagcagcacggtttggacatttcgaaatgacagcatcgaagatatctatatacactgaaatgcttattccggactgcgttccagaaaaagtagtaaaatattagaatcataatacgtgtacgtgaggttgatgggaagagaagaaaggagaggagaagtaaaagaacaaggtgaagcgccacttatataatatatatgggtgtcgtaagttattttttattattttcttcttactgactagaatgccacgtcagtgaaaccaagcatccatcctgccatggcacctaatttaacccggttttgcaagttatgcttttcggtatttcagtattttagtttagagatacaagctttactggaagatgagggatgtgaagtggacttagtcctgctagaaaagacaaggagaatgggacaaggcgttctataattcgttggaccagttcaatttgcttctacttgtaatagattagcccatacaccaacccatttatgcaaatctggaatcaaaaaatccacttatcagggagccccggcccttgtccttggaagcaaatcattttcctttacatataaatgactaaatttcactctaggccatcttttattaccgatattttgctttggatcgctattttaccaatgttttcactttgaactaggtaatctcatctttctggcactttggaccacactcaactcttttattcatctatatcaaaattatcatatatcaaatatattgtacatataaaatagcgtgagtttactgtctcttttaaccatcaatatcaaacttatcataaatcaaatatattatgtatataaaatggtgggagtttactgatcaatcggagccgatgtactcgaaatcattcatcatctgagaagagagttgggtgatccaaagtgcataagattacccggtccaaagtgtaaacattggttaaagggaaacaccagtaatatataaaaggtgacccgaactgaaatttgcttgatataaattgggttgtgtttgtgtcatagtttgactaacagttagttctctttgagaaaaccaaattgtttattagaatagcttagtgtagttgcttagtggtttgctcgagagtgctttcaaatatatacgtgcgcaggaatttgcgatgcactgttgggattatgtgtgtaagatatgctggggagctgcagagcatagttgagatttggcgaccgagatcaatgcttgctgcttgatgatttgcctggctggctgcacttgtctgcacgggaccatattgcagggtaagctggtgctatgtttgtgcaagtatgcatatacctctgtctaatcaagtagcatatagtacaccaccttaatctctttagactttcgggcattctcatagttcactacccaaagcacgtgttgatattcctcattgcatgtgtcttataaaaagcctatagtgccatattcttctgatactcccatgtcaggctgcaaatggagcggatcaggcccacctggcaccaataccccctggcctcatttgcttttctttttttttttgggaaagggaaatatattactcaacaaagctttgacgcctgaaatttctgttgtgtaaagcatcaacaacaataaaaatatagtcttcaagatcgaatatacagaaatttcaaatttctgttgtccaaagcaaatcaacaatactaaaaatgcagtttgaataaatacagtcaagaacacatacacacaatcaccagttacataaatttctgttctaaaaagcaaattaacgcctctaaaattcagcctttcaggatatcaaatatcatgcacaaaatatttgacgttaaacatcagaaatatctagggcattaaattaagttcaaacaaaatgcaaccttctaggtcaaactggcagactaaaaattaacgaagctagaaaatatcatctatgcatttccatgcttgcacagtccattcactccattgacttgtccagcttctgcagaaaaacagagagatcaaattaacaaatgcagaaaaaacatgcatagcaatccatctattcctgtaagaaagattcccaaggtaatatttactctagtccccaccaccttctttctttgagctgagcactttacgtcggctgtggtcattgcctaccggtaaactcccatacttccttcttttgttcgagggaggtcgtacatcttccttctttggttggatccaggtcagaaagttactcatattatggactgctactcaaatcttaaatgcaattatgcaaactaagaaaattttgttaggcaggtaaaattaattacaccagagaaccaaattgtccatgaagccattcatgatgctcattcagaacattatggctgtgtttagttacattcaaacttccaaaaaatccgtcacatcaaatatttagacacatgcatggagcattaaatgtggacgaaaaaaaccaattgcacagtttgcatgtaaattgcgagacgaatcttttgagtctaattacgccatgatttgacaatgtggtgaaacaataaacatttgctaataacggattgattaggcttaatagattcatctcgcagtttacaaatggaatctgtaatttgttttgttattagtctacatttaatactttaaatgtgtgtccatatactttaattttttttaaaagtaactaaacatggcctatatgcctgcatatttctaccatggtcggaaaatcacgaagcaaatgaatcataaactatgggatataaattttgtttacttcaaatttatatgactttctttttttccagattaattctagacatcaagccgcagcactctcagttactacaaatcaccatgcataatagatgcgtactgcaagctaactgagcgatatgaaaattgaagtaatttgcagtaagtgcaaccttccaggatatgcagtcaaatgaccagatccttcatttggacattcataagcttccacagtccattgaatcctctatgtccaggttctgtaaataatgtcatcagcaggaaattaaacacacatgagatcaaataaacatgataggtccataggttcatggaggaaattaaagatagttaattgatagtacatgcatgagctgttaattaaagatgataattgattatgaccagaagctttgttaagtatctcccgtatgtattcttagtgactcaattacagaagcagtatgaaacagagcatctactgctaactgcctaaaccaataatatcctagacaaataaatagaagtaaatttactgaccacaaaattatcactgtaggtgtttcatttaccgagctcacatttatgttaggacctagcaatc

SEQ ID NO: 50402 - DNA, 661 bp, Oryza sativa
attactgcaccaactagaactgcccccattagtaaatagaaatgtctaaacagataaactaacagcacactgcacacgtcaagctacatcctgaaggatgaatactcaccagtagatccacgacggctaacacgagatatcacttcacccacgaagaggaacacagaattggaggcatctagtccattagcatcttcgccagcagccaactccatagccgcttgttcagttgcaacaagaagctgatcgacaacacacttgaagaatgaccttggtttccatcaaggacttacagtttggaggaacaaacatagtgcaaataaatacatattagctgagaaaaagctaacagaataaaaggaaaggaaaaaaataacaaagatgtttgtgtttgtgtgtgtcgtgtttggggcggtgggggtgaggatacgatgatgtcagtgcaggtgaagctcccattcttgttttatctggaacagatgcaagtagttgagcaacccttgaaatgaaagctgctctgcctgggttcaagttgtcatcatcgtgcttgctgcttacagtaaactctgcaataatctggctgacccccttattctcgaccaaacatagaattaacagcctgaaatggggggaaataatgacacaccaagctcaaaacata

SEQ ID NO: 50403 - DNA, 2080 bp, Oryza sativa
ccacttcaaggcaacatctggacaaccaaagtgtgagaatgggattataactgaaggaactttgcaactgacctaactgtgatgaacaatcaagaagttttgagtgtatagtaatcaaattgtagagatcgataaacaatacaaatgaagtatgacttgtatgactggcagataacattataagcaaacaggagagttgtacatgtaaagaatatcaatggtacaaagtatatatgcagtgatagattcaagagtaaacttacggccaagcaaaatcttagatatagtaggaaatgctggaccatggtaaaaagcatgcctccaagatccccgttcatcattgctgaggcttacgccattaattatctgaaagtacagaaaataattctccctgttacatcatggcctaaaaggatggaactccaattggctatttggctgaatcatattgaaggaagcatgtgtctttgaatatccatactaatttatctctcaagcatgaaacatgatcttctgtattctgaatgcattatcaaatgacacaggttttacaaaatgtgtgctgctacagctcacctagcaaggtcctgcaattcgattacccattgtgtgaccaaagttataggtttatcaactggaaaattctgtggatgcttatcaatccagtttcggagtaattccttccagagatcaatttcctcaaatatatgcaccacaattatgacattacagcggctgaaacattgtccacataaccaatagttcactatgatatcttaatgctccatttctattttttgtggcagaattactgctccatttcggcatacagtcctttgtgattgcaggtcaaaacaaaaactcaagacttccccattttttttatcacagaccccttccatgattattagaaatcacacatcattgtttatgccagaaccaaaaatagcaaatgataaaactactagtaatttttctcagatggacgaaataaaaggcctaaaattagcacagagcttcacctggctcctgaagggttcgtccacggtacctacaagagaggccatcagacaccccaagtgacggcgaatgagataaatgggaatagggagcatgtcggattaggattcggagcctcaccggctacggcagcggagtcgacggggaagacgagggcggcgacggcgtggatcgcgcggacgacctcgccggcgctcgacgcggcggcgaccgcgtcggccgcctccgccaccttgtccagtgctaggtcttcgaggcgcgcgccaccatggccgccgccctgggagcccgcagccctcgccgcggagctgcttgggttgctcgccatgggagggtgaagggaaacacacgacgaacctaagagagagcgcttgagaaggggaggttttggagcaagagtaattagggggttttgtttggaggagaaataacagttttacccggcttgactgccgttggctaagataaaattttggggtatgtttgagaatatcaaaatttgcaaatgaacttttgttagagaagatgtgtttgagataccaaaaaaataattgaaggaattaagaatgtcgaatgtcaattgtacttttattcatgataccagtagtatattactcctattatttctaagtttttttataaggatagaattggagctgctaagagcaagtttaatagtatagccaactactagctctaaatcatctatagtcaatctactccttccttcccaaattgattttatacaccaaaaccaaggataatttaaatcacatcaatcaatacaacatacacacattctcccaccatgcatcgattaaaacctcatgccacttacaccatagcatgcacacattcttccatgctgtattaactgtattctgctgaaatccgtgtccatgcagttatatgatgatcaatttaagaatttttagattcttttacatgatgatcaatttgggaaggattgagtaatagtaattcatacaatagttaactagaaacatataccacactattaatatctggtcccacatgtcatactcacattgcctcttgg

SEQ ID NO: 50404 - DNA, 532 bp, Oryza sativa
ttaacacggaaatgcttgttttaggcttggcatacctagatctgatcatatcaagaagagctggggcaacagctgatgcttctggatgcattgccatgcacttcatacagacaccaagcatgtatatcaatttacctaggacaacaaagtagcgaccaaggaaatcgataccatattactaacgaagttcaacatgccattcttccttcacattagtttacactggtattttttctggataaaagggacacacaaattattcgtatcagttgggatgttgtgcattgtgatccttagcaatctcaattacttttctacatgctaaattacacattgcagagataatgtacaaaatcatcaatatgtacatgaatctaaaacaaaactgtggagaaagtttattagtattatgtagtacagatttatatagaggtgaattgaccctaagcataattcgtaaatttacaactaccaaatcaaatgcaagctatctacggatctaccagcgggggcgaagcccaatagaggcccg

SEQ ID NO: 50405 - DNA, 661 bp, Oryza sativa
catagtgatgataaattctcatcctagtgatgagaaatgagactcgcccaccgtctgaatagcaaacatgaggcaacatgcaagtaccagccgaaatcaactctctgatggtgtgatatggttgccagccatcggtcaaataagcagccattttgtgtttttacatttatgaatcacaatcgtactgtaataataaactagttacatctatatttatatttatagatcgtttttactttaattagcatatgtttcatttatattatgctaaactcctatgatatgtggatgagccaattcaccgatattttgtttcctttcagacttcacttaagagatctactcttccaattcagcatattaaacttctaaaagcgcatctaaaacactgtggaaagaaattgaatttaatctaaatcggcacatatggaaaaacatggtggaaataataatacacagtacacacatttaaattttagatatacttaaaatccatggtacaaaaatatacttggatatatttatattaaattttacatccggacgtaacgacttaaaatatacttggttccaaatttaattaggaaataatgtactgtcagcctaggtaggcgagttttaaattctaataatctacagtacacacatttgaaatatagat

SEQ ID NO: 50406 - DNA, 567 bp, Oryza sativa
atagaaggcaagagatgaagttctgtacgttttggattcgtattcgttcagacctcctaacagcatcaacttcaaacaaatatagccactgatccagaaggactctcggggcccatgagtacttgttggaaagcttatggagtctactttgatatggttctagtcctacatcaaaattctttccaaggagttaggaaactacaaaacaagctatataccttatccagtcggagtctgatttgggctttgggctttgtaattgtttcgtgggctaaaccctatccctaatcatatttattcagtagtcgtcatagttcagagtgaggttttgcttagattatcttatctaatgtagtttcgctactagttcggtttgtggaacccaaaattcaagtgctaaatcattcatatgtaattgagttgtaatctaccttgtttttggttctgttcttcaattcacatgtttggattagccttgtcagtgaggtcaatcggaccgcgcactgttgataaaaggagacatggtgctgtggttgcaggttcgaatcgtgtttattggaaactgga

SEQ ID NO: 50407 - DNA, 514 bp, Oryza sativa
cattagcgcgtgattaattaagtattagctaatttctttttcaaaaatagatcaatatgattttcttaagcaactttcgtatataaacttttttgcaaaaaaaacacaccgtttagcagtttgggaagcgtgcacatggaaaatgaggcagatggagctgggaacttgattcgaacacactagcgaagggtggcccgatcttcacgacagtaggtagaaaccaatgataacttgctgtagaaacagtgggtaactagctttatacctgccaaggttggatgcgaccaagcgacggggagagagacaccgaaaccgtgaggacttcgactcgatctccgaacgaccgcaaaaccacaatccggtatatcctcacaatacggtgcagctgaactggaagccgtagagcacgaactaggggccctcaaagagatcttcctcacaagtccaagaagaactcgcaagaacaaaggggtgtaagatactcaagcagctcggctgcaaaaacgggggatcc

SEQ ID NO: 50408 - DNA, 1348 bp, Oryza sativa
cccatagggtgttcaaccaggattccttttggtggagggatatcattaatctctctgtttttttagggtgattgcaaggtgtgatttactctatgggacgaccactctcttttgggatgatacgtggaatggtcatataaggagtaattcatatccaagtctatgtactcatgctattaacaaagtttagtcagtggttgtcacttgttcgaaactcatgaggcttatatggaattcctacagctcagagcggaacttgatagtttaactttgtcccatcagcaaggggataattggagcttcattcggaagcgcaacctacacctcaaaatgcttttacatgctgaactttgctttcatgcaaccttcaagaccttttcactggagatggaaaacaagatgtgtgatgaagaacaaagtctttatttggttgcttttcagtgataggctgaatacaagggacatgctggatagaaaaaaatgtgctcctctgaatgctgatcttatatgttttctctcttctttgcagcatagggaaacctttatttatctctttttttcaatgccctttcagtaagagatgttggcataagcttggaatatcatggaatacctctttggaattctttcggatgttggtcttggcaagattgaggtttaggcataagggtttcttggaaatttgcttcatagcatgttggcatatttgcaagcaatgcaatgggaagatttttcagaatatttgtcgatgttttagatcacgactaaggtatttgcatggtatggggatcattggtaccagagtatgtgtaagattgaggtaaaagagacggaaacaaggactttaatacaggttcgggccccttattcatcagaatcaggtaatagccctactcctgttggctgaagccggtgttgctctttttcatcagaatctacaagtacaatatttgggataacctatctaatcgttgtcgacttggcagcatggaacaccaatatgtagttgacgacggggtagttttcctccttaaatacgcactcggcgagatcagagatagcgctagatccctcttgtcagcctctaatggcaccaaattgggtatgtgttgatggtccttaaattataatatctgaccgtcaatacctgcatataatggaataaaatatcgtattcaacttagtggtagagtttattactaatcatttccactagtgatggtatatattcggatggcacctgacaaactaacatagttcagaggaaatatgcatgaaaactgacgataactcaaacacatctccaaacttatggagttttggaccccaaaacccaattaaacacctc

SEQ ID NO: 50409 - DNA, 887 bp, Oryza sativa
tatctgagactatttgttattaggttgaatctgagatgaactattgtttgaatgttgttgtatttggattgtatctgtttttagttgaatctgagatggtatctgccattatgtttgtatctgagatggtatgagaaattggattgaatttggtggtctcaaatttaatgggcctgtttagtgggctttgatatgatagttggttgataaaatgggctagttctgaaatgggcctagttctaaaatgggcctattttaaaatgggtcagttctcaacaaaataatgggctgcagtagaaaattaatgggctgttaaaaaaataatgggccataaaaaaataatgggccgttaaaaaaataatgggtcatttaaaaatatttgctgacattaactaccacatcatcagtgacacgtcatcacacatgtgtcaacgaccacgccactggccattttggccgccacgtggcaaccatccgtgacgtttaatttcatcacaaaggttgggactggctggactacacgagcccaaaagcgttttatggcggttaaaaaacgtcatagattgtgctgatccgtgacaatttcggagaaaacgtcggcagatttaatctgtgatgctcaatagatgacgatacgtagaatcgtcacagtcaaattactatgacgaattttcagtgatccatgacgaatttttttcgtcatagattattgtagtgctctaatctagacaccacgtctaagttattaattactactctaatacttgcgcaggaactttcttttttatccagagtactagaactggtgcacttagtacgaatactaaacaatgaacccacaaagatggaaatcttacttagaataaataattaaataacataagaaa

SEQ ID NO: 50410 - DNA, 594 bp, Oryza sativa
aactaatttcataactcgcctgtaaaccacgcgcgagacgaatctttttagcctaattaatccgtcattagcacatgtgggttactattgcacttatggctaattatggactaattaggctcaaaagattcttctcacgatttctccctaactgtgcaattagtttttttaatctatatttaatactctatgtatgtgtctaaagatttgacgtggtgtttttagaaaaaaatttgaaaactaaaccaggcctaatacgatttaatctaaataaattaactaccaaaatatctctatcttccatatcttccatagtctagatcaccgcaatacggcaccctgcgcagcctgatgcaatgcagccgagcgatcgatctccagcgtccatctgcacacgcccttccgttcgcatattccaccagcaaatccacacagcatgtgatcagaagccatgccttcatatgattgcagaaatcaagcaccaatacgatccggctaaagacacaagaaaccaagctccatctatcgctgcatgcactacacggcactctgcataggtatgcagtgctgctctgctctccatctcaaaccaga

SEQ ID NO: 50411 - DNA, 967 bp, Oryza sativa
ggcacttttcttcatgacgatcatgactaatctgggcataaaaaggagcattcccaacaggaatgacaaaggacatcgtacgcaactactggacaaaaccttcaactcaaaacaggtactcaggcttgtaacacggcatctaaagacaagtgaaaggagagagttaagacatctatccaattaatagcacaagtttttggattaatttgaataaagtttgaaaatcaaagtaaaaaggtaagtaattaaagtaaaccaagctttgcgaaataaattaaaacagttggaaacgagatcataaattttgtaattttgaataactggtttcaaaagaaatgaaagaaaattataaaatcaacatggtaaatttattttattgcagcaagattaaataaaacaatattgtaaaacttttgctgataaatgagccattagtacagtaatagatgtacagtactaataacactggaataaatttttaatgagaaccaaaaaaaaattatgaagtgcatgtgccattagtttggttaattaaaagagaaagggaggagaacagttctacttttccaatatttttagagggcttctatgggtaaccatttggcataacctagggtcaaagaggctctgataccaacttgtcacgcccggaatttctatccaaaattccaaacgcttacatgtgtgtgaaccctcgtccaggaatcagccgaggcacacaataacaaattgataatagagtacaaatattactctaattaataagcgaatagaatgtcattacagaggtagatagttcctctcaatcaataaagttctaagcagcggaaaataaataaacggcgtagacggctccactccacaggcagcttgaccaaggctacacctaattctccacaccatcagcctcattgtagaactctttctctgatgaatgattgcacggtgagtatatgacatactcagc

SEQ ID NO: 50412 - DNA, 740 bp, Oryza sativa
tatctgaccgggaccaacgtgtcatctccaggagctagcacgctggctccggctagggacaagtgcctggaggctcttatcctgacgggatggggcgaggcgtgtgtcagaccgcctgttgccacctaacccacgatctgaccggtctgtgaccggtcacagaccggataaacgagcgcgctgcactgcgttacatgcggcgtgacgcgctcgttcaaaccgcaataaatgcggttaggtgagccccgccgtgctcacctaacctatacacgcggcgcaaaacccacaaggggtcggggcgcctcggccctcggggccgaaacgggagcggtccgatccctcggggagacaaagagaggggcggcctcatcaccttcgggcccgacccccccgagggggtcaggccacgtgggtgattgctcctgcccaaacctctagtcatgatactcccggtcccatgtcaccgacagtagcccccggcgttatgccagggcgatcaccctcctcgagggaagcggtcgggcgtgacgccacttacttaggcctggtgacaagtggggctggtctctacagttgggcagaaacccaacggtcgcaaatcacgcacatcggcaatggtaactcgactgtcaataatgagcggcctcttcaagactgccacattactcgagtagcacacgaatcgggacgagccggttcgttttgcctggagatatggtgatggcacttcggtcggcgag

SEQ ID NO: 50413 - DNA, 625 bp, Oryza sativa
ccacaataaaccacaattcaaagtgcccaggtgatatgatattcccaaagtctaaagttgtaaaaccacctaatgttacctaattaaattgcgaagcatctacctaaaatcatactagtgataccacgagtagagtgtccactagttggggttttgtttaatctagggtgaacaaggtaataataacaatagcaataataatagggtcataacaaaggtaaataggcatggctaaataaaacagtgataacgcgggaatttaaataaagcgataatgcaataatttaaatcaacataagtttataaactgggattcaatatgatcaagatgatgtgtcttgccttgctcgctttcccaaacaccgtcttcaacttccacgaagagcggatcttccgaagctacagcgtctacacgaccaacggaaaagaaaaggctcaaactgtcacgtcctgataaattcatcccaaaataaaaatcattttcaaaaaggaataatagaattaattaaaattcgaaaagaaattggcaaaccctaaaatacgtacaagaaaaattcaaatgtggcccggagaatttttgttaaattctccttggtctaaaaggagccctcaaattttagtggaa

SEQ ID NO: 50414 - DNA, 862 bp, Oryza sativa
aggatgggttggaaactatgtcacgtcttccgtctgtataccgtggtggtatgtggcacgtggttacacgtgagaaagacgtgtcttgtgggtaaagatgtacacctctgatcagagtttaatctattcgaatagccgcgccctcggttatgggcaagccgagcaatgtacccaagttagtgttttaattcttaaaacccgcttaacaactaaaatgtggaatggttggcctgggttggcttgggacgagctgggacccagggtcgggttgccagttcggtctgaatcatcgtaggccttgggttaaggcaggttcgtgtgggttcacggccttgattaataatattgtttagtgctaggatcgcgtttacaaaatagccttgagcaactaaatgtctttaaatgctgtttactgcaaccctaaccctttatattataattcccttgtactcccttgcatttattctgcatttgtgggtgtgtcttgttgagtacggtggatgtactcagtcttgctcaatttttcccaagtccagaagaggagttccttgaagatgaaggctttggtgtctagctcgtgcctgctgtcaagcgcctgtggtcgtcgccctagtcttccgctgtttttcgtttgtctttgtgtgctgggccttcgctgcccgtgtaataattctatttacgcttccgcttgttaaactctgaattgtatcagcttttggtgtaccttgcctcctgggacaaggattaatgcacgcacgtcaggaacgcccgttgggttatttccggtcgtgacaaccgtttaggcaggcccccgggcgggtttgagtatctgtatgtcgcgatcgacaagttcactaagtgg

SEQ ID NO: 50415 - DNA, 583 bp, Oryza sativa
ccatatacttatggacagatttataggtcctatatgcatcaatgacacacaaagatatactccattcgtcaaaaaaaccaaacctgggtttccgtgtacaacgtttgaccgtccgtcttatttaaaaaaattataaaaaaaattaaaaagataagtcacgcataaagtattaatcatattttattatctaacaataatgaaaatactaattataaaaaaaattcatataagacggacagtcaaacgttagacatggaaactcaaggtttgttttttttttaggacggagggagtatgtgtgcttatattagctaaaatgtggttccaaatttactagccaaacgcttggcaaattaggaaaaaaattaaatctagcttaggcaaattgagtatatcaaccaaacaggccctaacagctagaatgcattccaccaacccaaaatcgagtgtgagagcaagtgtgtgatgagctgtggtatacacgtacgagtattttatactccctacattctaaaatataaggcacaaccacacttaacccaaagactaagaaataattaatgtcacatcattgtcatgaatc

SEQ ID NO: 50416 - DNA, 3258 bp, Oryza sativa
cttctgggtgaggcatcacaaccagcacctcgatgccccgcctaggccactggcccacctcgaggccacccgctgactagcaccccaaccatctctctaagccaaagaacacctccgacttcctcactcccgatccaccccttgccccttcccacaacctaccttgaaactctataaccacttcggagctcattgaaactagaaaaggaaatcgtggagaagttctggaggttagaattttgagctattgttcatctagaatatgccaagtgatgtatagcaattctgtatgaacatgtgtaacacggacggtagccgagcccaaggtggtcgattcaaccctcctgtcgatctttcagaattaaaaaaagtatgcgattgattaaatttcaagtagaagagaggaaattcatatgggttatttaattacataacttcagagcttgtttggtaaggctccacctttagagttgaagcccaaccaaccaaacgacttcagctctacccaaaaagaaattagtggtgaagcctaaccaaacgcttttagctcaacccaaaaggagcaggtcaggctacaacaatttgataagatgaattacagaggtggagcctaaggcccctaaagcctaagggcatgtttggtagggctccaattcctaaatctaactctaggagtaaattttagaatggagatgtggtatggcctccaccctagcttctagttaacatttttagatcattctagcccattactctctttttaggttggaactgaaaccatttggtttaacttcagctccagatgtgaagctggaattataaaccctaccaagcatgccattagtttaactttttgaaaagaactagttgaagctagtggttttgctatttgtttcaaagaatcctatgttttaggacaaaatgtttcaataaatcccaattttatgtaaaatattcatatttcattattatatatgattgttttcatataaattcacattagttgactcaaaatatgtgccccccttctctactttgtcattgtccttactttcatgccacactattattgcaaaaactcaacataatccaaactaataatgacatgataacatgttacatatacatatatacacaaataataaaactatcggtaaccaatgcttgttaaaaagaagcaagcgtgtataaatactttaaaaaatatcaatacatttcttttacatttattatggataaaatatatcagccaaatgaatgacataagcttgtacatggagtcttacggaacattttacccaaaacatggggtctcatgaaacaaatcacaaaacctgatgttttagttatgtatgccccaaaacctagggttttgtgaaattcactcaaattttttcaaggcgtggttgttttttattcgttgccaaattctttaggtgtttgagcttatagtgttctcttgcaaaagtttgtagcaaaactattttttgcagcaaaccaaataaatgttaatccctaataatattttactcactccatctcaaaatataacaacctaattttaggatgaagcctattaagattcatagtacttggtgtataattgagtgctaagttgctatatatttaaacggagtgagtaactatcatatttcgagtttaggttgcaaaacataattaccatattgcccagcgaggtttcatgtgactcccttttgtttatttttttagataatagaatataatgtcccggcctttactcaaacagagctacagccaattattacatagaagcattcaagaacatagtgtagatctaattaaatagaacaaaccgtaacaaaaataaagaatcgaaactaacataaggagatcacaattattgaagactcccttttgtttataaaaggtaacttttatatatgaatttaaacataggttttgtctaatcatataatggataaaagttgtttttttcttttttaagggagagagtaggaaagaagactcgaactgtcgccgtctttagttccaaaataattcttcaaacttcgaactttttcatcacatcaaaacttttctacacacacaaacttccaactttttcatcacatcgtttcaattttaaccaaacttctaattttggtgtgaactaaacacagcctacatcaagcgacaaagaaagcgggctgggccacatgatgcagagccccataaatgattgaaaaggagcgtgcctttgtcttctggcccatttttgtctcttcgataggctattgagtgacaagcaatattatgtggattgtcttacagccactcaaaattttccagttccttttctcctctcaaaacaaaacaattttatgtttttagcatttctgatagtggagacggcattagctaggcaacctctgtggacgttgttttcatcccctttcgacccggcaataagatgcgatgatacagttgtgtcatcatgtgattggtagagggacaattttaaatgaaaagaacagaggccattcattctataccacaaaaacgcatactctgttttttttagagcaacaaaaggtcactgggcggctggaatgaggtcattcaatgcttgaactctatgaaatatgaataatatactgtagaggccttcgacatgtcctctaagttttacgaattctatctagatctaaatatatggtactatgatgtatcatatctattcagatttgtagtcacatcatatcctagatttattatttatggaacagaggggataaccgtaatcttgctcaatcaattgagacatactcattccattaaaaaaaccaacctagtattgaaggtgacattctctagcacacgaaagattcattgtactagaaaatgtcacctctaatgctagattcagtggcggacgcaggattaaaataaagatggggcgaagttgctcgtctcaataagaacaactgttgtaatcatataaacatatagtataatcaataaattaatgcaaataaaaaaaatatattaaaataaagtaacattttttgcgccatacataattcatcatacctaaaaagatactagtaaacatatcaatttgcaaatatgagtcaattcataaagcatggttgatagatatcttttaaaaaataaatatatgagaagatatcgcatacccagaataaaatgattattattttgcttagaagggagagagagaaaaacattaggcatctagtaggggacggggatgag

SEQ ID NO: 50417 - DNA, 835 bp, Oryza sativa
gacttctagaaagtaaaaaaaataaacccgttgataatcatattagatttttaaaatctcaatgacaataaaacggagaagcagcgggcggggtgtataagagtatagttgcagagccgccgacggttgacaggacttctagaaaataaaaaataaattccaactatagttatgtttgatttttttaatcacaatgataataaagagtagacagcggacgggctatagaggggcatagtggcattgttttatgggacttctaaaaattataaaaagtaaaattataagtccaatttttaaaggctcggaacttctaagaagtaaaaaaacaatgataatcatgttcaattttaaaatcgtaatgacaataaagaatggaggcagcgggtgagccgtaaaggagtacaatggcaaagccgctaacggtttggcgggacttctagaaagtaaaaatgaacccaaacgataatcatgttcgatttttaaaatctcaatgataataaagagaagagacagtggacgggccgtagagtagtataatggcaacgtttgacgggacatctggaaattataaaaacgaaacccaacatgacaataaactctaaaaactataaaatctaatttttaaaggttacaagaagaatgaataaaaatagtaatagatcgagcaaacaaataaagaaggagataacataaggggtagcaactggtgtaacttttaaaaattatataattagaaacacgaggatgctaagatttggtctttcaaattcttaaaacaatgagatagctatttaataaattttaagtaaaatcatactaaaagaatatatga

SEQ ID NO: 50418 - DNA, 1166 bp, Oryza sativa
cctcccgccgccgccggctccccactgccacaaggcacccaccgctgcggtggagctcagcccgggcgccaccgcggcacctctgccgctcgctgcggtctccgcccgccgcgagacagagagagagggagcggcgaggaaagagaagaattgagggaggggagagagaagggacacgtgggtcccacaatctatttttttgtgttaatgacaaatgggtcccgtacatattttttaattctaaacaccacctgaacgccacgtcaacaccacgtgtaaaggaaacccggtcaataccgccacgtcagcgaaaccgtcctccaaaaccgccaagggagtcaaattgcaccggttttcatagtttgagggtcaagatatccggttttgtggtttaaggtcacagattagatttcaatcacttttgagggtcaccaagtgaacttattcctagttaaatcgaaacggtagtaatggggcccagaaatctcgcatgttaatcagtgggtttgtcaataatcctggccatccatttagggcatgtacaaaggtagagtcagatatgagctctacgttatctagagactagcatcctacaacagttagagacaatatagtctctaatcattaatgtatcaaaatactttttcttgctcttctttcctttctttcaccaccatgaaacaaaatttgatctaataaatgctaagagtcgactctgagctgttgtcatgcataacaaccatactcctttatctttcttccatgtcatcaaatttacttgcatggcaatagagagataccactaataaaaaccgttgtgcatgcccttaggtgtgaccgaattataattacttcgattaaaacagaatccacatctgttatattgtgctatccgaattgtatacttcgattaaaaaataatctctactaacctaggtggaactgaattctaatgttttcagattaaagggaagtccacatccgaattgtaattagtgctaattttattaaatctagaattataaaatcaatattagagtccaagatgaatacaacgttgatccctccgcttcattgaataaaaaatatattcaattatgtatttttaatataataaaactaataggatattgtagatggcattatgtttctctataaatttgttt

SEQ ID NO: 50419 - DNA, 697 bp, Oryza sativa
catatatatatatacctataagctgaaccaaaccaatatataaggttcaagctaattaatttgtacccaaggtatgaaggaatagggtattcaatgcaaattggccataacaaaggaataggtccacaccacccgatgacattcgaaaataaatgcacagttgaaataaatagagaatttaaatataggatcaacaagctcaaaggaattgtgtttaggatctgtgtgacttgccttcgcaacgacggaaacgacaagctaacacgcaaaacaaagaaaaagactaataaaaaccaaataaacagtacataaaagttaacaaatatgtagatcatgattttagatgaattatgagacttgaacggtctcattccgatttcatataaattaattacgaattttacaagatttaattccaattaaacctattaaagaaaagactattccaaattaattaaaccatttataaatgatttataactgagagaaaagattaaaacaacctccggaaaatattagattatatttggtagatgacatatattaaaaagaaatatatgccattgaaaagagagaacgaatagaagtctcaccgaaccacatcgatcggagaggatgggatgatgtcaacgttccggcagcaacacacggagatgacaatgctagaccatccacggattggattatattggattaa

SEQ ID NO: 50420 - DNA, 712 bp, Oryza sativa
agagcactacaataatctatgacgaaaaaaattcgtcatggatcactgaaaattctttatagtaatttgactgtgacgattctacgtatcgtcatctattgagcatcacagattaaatctgccgacgttttctccgaaattgtcacggatcagcacaatctatgacgttttttaaccgccataaaacgcttttgggctcgtgtagtccagccagtcccaacctttgtgatgaaattaaacgtcacggatggttgccacgtggcggccaaaatggccagtggcgtggtcgttgacacatgtgtgatgacgtgtcactgatgatgtggtagttaatgtcagcaaatatttttaaatgacccattatttttttaacggcccattatttttttatggcccattatttttttaacagcccattaattttctactgcagcccattattttgttgagaactgacccattttaaaataggcccattttagaactaggcccatttcagaactagcccattttatcaaccaactatcatatcaaagcccactaaacaggcccattaaatttgagaccaccaaattcaatccaatttctcataccatctcagatacaaacataatggcagataccatctcagattcaactaaaaacagatacaatccaaatacaacaacattcaaacaatagttcatctcagattcaacctaataacaaatag

SEQ ID NO: 50421 - DNA, 653 bp, Oryza sativa
ctccagattttttccctgattaaattcgtatttaggcattacaagctcgtacggcttcggcgagcctccacgaatgcaggtgctctaccgccggaacggacggacggacaaacatgaggaagctgccactggtggagaaatgtattttactctcagttggtaaccccttatatttccggttttctaaccgggagtaaaaatctgggattaagttaaaataactgggactaagttttttttttctttttttttctattttgtatatctcacacatgttatctcagatcattcacagcaatatagttcatcccagatcactcgcagcaatagttcatcctaaatcatttacagcaacatattcattctcaaaatcattcacaacaataacacagatcgaaccacacattcaaccaaatcgaatcatttaacacagattgaatcatacattaaggaaaaaagaaaaaaaaatccacccagcagcgctggcctccaccgactgccgccgtccggccgcctcccctcgatctcctttgaatctgccgtcgctccccaccgctcgaatccaccatgatcaaacccaccagccccgctgctataatccgccagcgccatttgaatccgctgtcaccacatctcgccgccgttgatgacct

SEQ ID NO: 50422 - DNA, 525 bp, Oryza sativa
aattcctatgctctttgttatggccatgatgttgatttgatatccatgatcttttttaaccctagtaaaattataacctgactagtctagtactctacatgatggactgacaagttgctttaggtaaatgcttattgtgcttagttccaacctagaacttttggataaactagactatgttggttaacaattaaaactggtttagttattaactattgactggtttgtcaatagatgggggataaaatgttttgtgtaactaaaacttatttttgggctaagctcgacgtgcaagctagttactttggtagtcgcaccacggctaatataaggaccggtctgcgggcctctgttgcaaggcatcttcttgtaatcacaagtctagtgggtaaggcctgactgaaagtttagatcttctcaaaagagataccattggttggaagggtgtggggccaggattaaggccgattttcacccgatgcaagggagggcctgtctccttatcggggaccggtgggcaacgaa

SEQ ID NO: 50423 - DNA, 1181 bp, Oryza sativa
ttttagtagggaattatatatcaaattaagcttggcatatttaattagttgtgacatcatataatcaatgttgccaatctagcttaaactcttctataataactattttaattgtttctttaataagaaagatgatacatggggtgtgtgattgtaacacctaagatctcatgtttaattcttgacagacttataattttctctaataaccaagtttcttcttggttgtacttatttttataagcaagatgatttacgtcttcgacctttgtatataaggattttcacaatcataagattgtgttaaaaaaaacagttttaagttataggttcatagaaatccgtgatgtttctcataaatcatgcattactcagattcaagtgacctctagttggcaaatacgtgtaaaatatcggaatatctacgattggctacagatttcgtgaagaagccattttgggagaaaggttggccaaattgtctgataggacgaccttattcgccaactaagtatagatttgagagcctttttttaagttaataataggaatttataaaacccaggttccacaccaacatgggtgtatccaaccaaaatagatttgggagctagcaactgtaattatactgttaggcgaaaaccaattcagcaagtcttgtttttcttttcgagatgttggcttgaaggagctatctagctttctgtgctgcaaatgtactcgaactaagcgcggctcctatcctgaattcctgattccctgcctgcaaaagaacccgaggaaggcaagaatatatctttcggtttggacaaacgtcctattctctcaattatctttctacaattagacgaagttacatcaatcccctgaaaaaaagggaaagcgaataaagaagataggagtagtacttgtatcgaaaagcaacacccgtctaaattacaattccaactctgttctgaaaaacataaggaaaaaaaaaacaactgctcacagttttgttctattggaattcaattaatagaatgcaatgtaaacgtcatgatctctacctaaaataagtaaacccttacaaaacaacttaaaatatatccaaaaacaactccaacttctcgttcatgagcgttaaaatgatccatactttgctaacatttcttcccagctccagtagcagttgcaattac

SEQ ID NO: 50424 - DNA, 6195 bp, Oryza sativa
tacagtacctcatcaatacttattaggtatcagacgatttctactacgtagggggtgatacatacaaggtatcagagggtacctaccaaatatcaggtgattcttactaggtattagggaccgagcaccgagacgtcatctccggtggccccaccctccacgtctcatgctggagcttgtcgccggcggccgtgtactccgtcgtccacgccccacgctagaggtcttcgtcggtggacgcgtcctccaacgtccatgcctcatgtcgaagctcgtcgctagcggccacgtctttcacattgaacaagtcctccactgtccacgcgccacaacaaagctcgtcgccggtggctatcgtgagcaggtcctccattgtccatgccacgccggagcttgtcgccgacggcttcgtcatcctcgctccacgtttatccactccggcgagagttccatcccggccatcgtagtagcccacgctcaccggctccaactccatgttcgaccactccggcaacagctccatccctgccgcagcccacgtccgtcggctccgacttggcatccgatcactcaggcgacaactccatctcggccgccgctgcagcacacgtccaccggctccccgtcaacatctccatcccaagcgctgccatggccgcgtgcagcctccgaattagtcgcctcgctcagatgtggtggagctgattgcatcccattccaagagatagaaatgagatgccgttgtatagtatttccgtaagcataagcatgagcgaaaagatgggacgattaggtggaatgcaagtcagcccacttaacactccaatactacagaaaacatttgtagcgcttaactgctcgtacacttaagttacattgatgagattttcttattatagtatcctttggtgtcttcacactaagataggatagcttatcattttgtttgtacttattataagcaaaacagtttgttgacgattcaaatatagtttatgagtaaacttttatatacgtgttatggcgatttataaataaatattcaaagaaaatgtcgacgggctatacctgtaaacgctatttgtagagtatggagatcgttagaactagggtatatgcgagatcggatctaaggaacaatggacaaggatttatattggttcgagccttcaagttaagtaataactctactcctatttgtatgtatgtatgtatatatggatagtaataccacacagattacaatagggaataggacgactaaactaatatgccaactagaacttgttgagaacggctcgacaaaatctatctggtgaatatagcggattgcttctatatgtggctttggctatgagttgtaactcgatgtccctttctggacgggtgaggtcatttatatgtaatagagatcacgttcttctccaaataagactcggagaaatgaaacatgacatgggcttaaggagaccttatcactcccaagtaggactctgacaccatctattacgagaagataattttcttttttttatctaccatatttccttaattaaaagatacattcttgtatactatcgggtatatggtattgctgtatttaacgaaccagtgtataagaagtatgccttattgttgacactaacaaaactgcaagaaaaaaaagcataaatcaaaatttaaattttaaaatctaaacttgtacttatgcttataagttgaaggctaaccgaaacaagcgaaaaacactataaactgtaataataccttaattatcataaattctgctttacattgatcattttggacatcgagtcattgatacagtctctgcacatattttattattgtattttctaactatatgtttataaaagaactattagaaatataattatataaagtgtttatcatgacaaaaactatcactatcgttttcttatatgaattctaaatatatatataagacgacaaaaatcgtgaaacggagcaagtaaaaacattgttaactgaacgtgagtacatttttacttgtggaaagttacaaaattccacattccaggagtgggggtacgcaagagaaaggtgaagagtaaagacaaagcttgccctggaggaaggggaacaccacgaggagtcgaggccacaatgccacatggatacatgattcccttggatctgagcacaccgcccccaagtcaggtaaaagggacagagagcccacatgctgagctacccagcttctactcagccaacaaacaaccagaaaaatggtccttgtccctactccttaagatctccctcaagaccaactccatgacaaagcaaatggcataaaagaaaacgaatagcactgaaagtaatgtcgcccattgcttcctgctagtactgtaccaaacaattactccctccgtcaaaaaaaaaagacaaaccttgatttccgtgtctaacgtttgactgttcatcttatttaaaaaaattataaaaaaaataaaaaaataagttacgcataaagtattaatcatgttttattatctaacaacaacggaaatactaattataaaaaaaatttcatataagacggacagtcaaacgttggcacgggaacccacggtttgcctttttttgggacggagggagtagctattgaattattatagggtgtatttagttcacgccaaaattgaaaatttagttgaaattggaacgatgcgatggaaaagttgaaagtttatgtgtgtagagaagttttgatgtgatggaaaagttgaaagtttgaagaaaaaatttggaactaaactcggccataaccaggtgacaaatgagtcatacacctaggccctgtttagttcacaccaaacttcccccaaacttccaactttccatcacatcacatcacattcaaaatattcctacacacaactctcaacttgttttccaaactactaactttccccaaacttttttccaatttcaaaaactaaacgcagttgtactgtctctcgtgctatctctctctccccaaactactccattaatcatggcgtggatgcaggcacacagcataaaaagttggctaaacagggaccatttctgctcgccaacatgcgagctttgacattaactccaggctcgggccatgagagggatatgtcctcgtttttattttaaggtttggtattgtgattcatggaatcatggtggttatagtaccattctggggctaggccgctagggcagtgaattgaattcactgaattaacttccatgtctgcattctggattgcttggacacgtttggctgcatcgcgttggaaagtacatatttgatctcatctctggaagagccagaaattatatattctgtcatgtgcacttgtgcagcatgcactactccgtacacactttacacagtgcacaagctaacaaactcctcgttgattgagaccaagaagctgtagaaaataccgttggggcgttgggcgattaaaactatgtcagagctcgggatattatagggggtagcagtcgagtcacgtttactcgactcgtaactaaattcttctgtactactttgtgactgtatatgatatattgtgatgactgtatatgatatattgtgatgtagtactacgaatctaacatatgtatgttcatatttatattattagaatacgttatatttaatactatattagttttttttatgaaagagagcactctttttcagcctccttgcattggcaaatggccgacaaatttctagaagtgactgttgaaaggacgctgcaggtcttttgtgatttatgggtttaaggctggatttacttttgccaaagtgaaaatccaagtaggaaagtggtttgtgcctgaaggttcctttcttcggatccactctttgcagagttaaccacttcacctagtactccaactgtccacttggtcgtcgattctgttaccgtcgagtttcctttctgcatgtaaaatatcagaaatatcgtggcggtggaaccatgcatctacctgttgacctagtagtaaaaacggccataaccagggttagtacctatgtgtcaagtcttcagagcgagtacaatagcaaactatataagtcaactgtaagcacatgtggagaagagaagagagaaaaggaaagcggattacagatttataaccagctgcagcacgaactccaatacgttatgtgtgtatgagatgtgggaccatatattaatagtctattatataaatgagctattagattgattatagatgaattggagctaatagttggctatactcgtaacgcaaaaagatcctgagctacaacgaaccagttagggtgtgtttagttggagaaaaggaaatttttgggtgtcacatcagacgtttgaccggatgtcgaaagaggatttcggacacgaatgaaaaaactaatttcagaactcacctggaaaccgcgagacgaatcttttgagactaattaagccgtcattagcacatgtgggttactgtagcacttatggctaatcacggactaattaggcttaaaagattcgtctcgcgatttcccctataactgtgcaattagtttttctttttatctatatttaatgctttatatatatatccaaagatatgatgtgatgtttttgggaaaaaattttgggaactaaacgggcccttactgaaccgtaacttgccacttggtagggttaggccatgagcccatgacgagaggtaataaaggcttaaagctgcagaatctaggttggttggagtagtaaaaaagattcaaccgaggccaacgagatttcaactcccgcgtgataatcgaaaatgctattggtaccaacttgagataacctatactagtgtggtactgtggtggagtgatgttgtacagtacggagcgaatagacacggtggtgtggcatcgccggactatgaccagcgtgtcgtgaaccgcgagcgggatcccacatggacaacaaaggtcggatggggctaaaattttttactccctgtcacatcggatatatagatactaatttaaagtattaaatataaactaataaaaactaatttcataaattagctaatccactagacgaattttttaagtataattaattcataattagtaaatgtttactgtagcattacataggctaatcatagattagttaggctcggattaattaggctcaataaattcgtctcgcgaattagttcaaggtcatggaatgagttttataattaatctatgtttaatactatcaaatagcgtctaaacttccgatataatatgtactaaaatttagtctctgcaaagcaaacagggatcgatttcattggtagagtacgaagagattgagtagcgtgactccatggaggaaattgttagggaaagttcagttccgatcctaaagtcacgttccagcggtatcatctcggtacttacctactacaaacagaggtcgtgtcggtagaagccacacgcttagattaaggtctagtgtcagatccggacttggcgaagcaaaccccagacccacaatcccaggagtggcaagcggaacatgcatacaaccacccctttgtccaacaccaacgccaccgacaatttccgtcttgacttgaggctttgcgactcgacgagtgattggtggatcggtggcgtaatcgcggcttagactgcggatcagcggatgacagtctctccctaccccacaggccactcgcccactcgccgacacgcgctcgtgatgttgctatgctgcgtagtgtccgcgaactccgtgggcctccggctctctccgagtcgtcgggtgaaacgggccgccggcacgcgccacgcggccttcttctactacatggacgcgactgtttcggcgtgggaaagaaaaagtgtcgcggcgagccgccgaggcatcgcggctgcgctccgcagtcgcaagcggccaagcgcaacgacggcgacacggcgtggcgcgcggagcggtgcgggcagcggcggccccgtgcggcaggcagcaaatgcgacgcgagagatcgcacgattcccttcccggggaaaatatgtagtgcaaaccacgtatgtaatggaaacttggaaactaccattggatcgagaaatggacgtccgaaattcgtccacgtcaccataaattaaaatacaactcatagtgatgt

SEQ ID NO: 50425 - DNA, 2438 bp, Oryza sativa
actatgttgcactcatattgggatggagggagtacatgaagttgtggagatcgtaagctatcatgagcaagaaaaacagatcctagatcaacaacaacatcaagtggagaaaggtacttcggttccaggtgtcgcttttttcagcctctcgcatcacccctgcacaggcgatgcggggggggcatcccgaacccaccaccaccaaactctctccttctccgcctcgccaccgccaaagtgaatcgtcggaaaccgcacgacgagcaaggatggcagcggcgggggctcgggctgcctcctagctctagcatggggagcagatggtgcaaggtggggatggagatggcgcggcagtgacgggacgagcgcaatggtggcacaacagcttcccagctgagctcgactatcggagtgggctgagtcaacgaccggagcggaggtggtgcaagggggacgtgtcaaaaaaacacgaggcgagacggttgaagcctagatgcggctaggtccacctcccctgcgaccaaatccaactcccccacgatcggatccggcgccatggcggtgaatttacctaggtggagcaggggagcaggcatggaaagggcgcgatggcacatagaagcattccaggcatcgtccccatgaaggcgaggcctgatacggcacccgggtggcatttccgcaggggagcgggcatggagagtgcatggtggcacgtggaggcggagccaaaatctggtgccctgacggcgcttctgtctgggtggagcaggggagcggcgcggcaagggtgtggcgacaccacaacctagcgccgcccctgtggaggcggaatgaggaggatgttgaggtaggatgcaaggtggcagatgtacatccgtggatgtgttgttgctggagaggcaacgcggaatgttgttgtgacctcaaccgataccgtccagatgctcggggatggacatttacccctaagatggaggcttgcaacgacgtcagcgcgatggtgtggcactgacgcatggaggcaggcggaggctggtcgactactagtatcggtgtagtggtgtccacgcatttacgatgggtggttggtggtggagctttagagtggcaattgcagaatgggagtgaaaggtagacaaaaatctaggccagtttgacgggccaacaacggcggcgccttcgggcatcgttcttccttgttgaagcttgtctctccttccctggtagggctgttggtgaaaaccttatctagtctccttgagaaaaaccttgtctagtctccttgagacctggacaaatggcggcaacgctctttgtcgcgcttcctcctggagacgtcatgtaggaggctccattattgccaatccgttgttagacagtctgtttgaagctcttggatgacgacaggtccgtacgagagagagggatctttcttctctctcgccctctccatttactaccttttgccctagtgacgttgttgaggctaggtgttcagctatctggagtcgactctgggcactacagttgtagctcttttgttggtttagagacgaccggtcatgcttagcagcggttggtctaatgctggtcccttcctcggttgtgtgtttaggtgccatcggtgcatggtggtggcgtgtttgtttttctttttattgactttagcctttcagggttttagtattgtattttttttcctcctctcctcagtgaaaaattgcgctattgtgttattcgtttaagaaaaaaatagctcctagcatgttgatcgattcaagagcagtaataataagttagtcggccaaaagtccaaagagtgaaagccaggtcgtagtttatttcatttttgtgagtccaatgtgcaatttgtctgtaaactcgatcgataagaactagagcctagagttggctacagaaaactgatctactagctgatagagacactactagaaaaaaaaaacatttatacaggtggccatatcctccacttgcatctaaacgcttgcgaaaatcaatgatttttgcaggcagctaaatccacctgcctgcgaaaatatttttcagtgcaaaaaaaattggcagccccccacccctatcctccgcgcgctatcacgagctgtgccaccacgagctcatgcgtcggcccgctactgccgccgacctcctgcctccacaccgccgccgctgctacatgcaagtcgccgccgccggccctccccatgacgtagctggatccaggaggagaggggaggggagggaagtcgccgtccgaatctgggagtgggagcgccgccaccgcctacgatgacctcctgcctccacgccgcctcagccactgcatgcggtcgctgccggcccaccttccccacgacgcagccggatccgcgaggggagaggagcgccgccgaccttccgcctccgccgctacatgc

SEQ ID NO: 50426 - DNA, 2881 bp, Oryza sativa
ttatatttcacgccaattttcgtaggcggacgcataaaagatctgcctgcgaaaataaattttcataggcggacggtgagattcatcccggtttacatttttgtagacggtcatttggctccgagggtcatacctttctgaaaacataaaaggtcaacgttgctaaaaaatcgtttttctaatagtgagatggaccaattaaaagttcaatcttcggaaagaaaaaaaaaacaacgaagaaaagtgctcctaaaatataagttctttctccctaccaaatcaatttgacattattatggtactagtagttctcctaccactatatgtatgttccttcccttccgtagtaaatattaaatcagcactggaatcatcctcgtttctatcagctttgcctcatcgaaaggaacttatgatttgtttatcgaaaaagtgagtaggcatgtagtatcaatctacacctgcaaacacacaatttcttccttggccgagtagatcagagcggtggttaggcgacaaacctcgtcgcatcattgtcctactcactccggattgtttatgaattggttttcatcactttatctgcatctggtggcgatacatcggacgagctaatccgaaggagcagggaaagggctccccgtgtgttggcgttgctatccgaaggtagaggtgacatcgtcgtcgaccctactactcgcgtcccattggcctggccgttgctgctctgtgtatggaaaactatatctttcttccattatcatttattatttgtcggcagaaccaactagggttcttgattcctccttccattttctaccgcaaaaacaaatttcacgtgagacagtacaaaattcctcttaaatccttgtatattctcgtaggaacgtaactctatgctagcggcggtgatgaatcatttgccggtacattgtacacgctacggcaggcattgtttttttttttctgttaaggaacttatcctagtcgatctcctacgtgccacggcatctactggtcatgtcattggcaatcattgtttagttgctgattagaattgcaatcatatgttcctgacaagttgtactgttgtacaagaatctgtgatggaaaccatgtgtgcatcgtctacgcgtgccgtctcgcccatagcgaatcccaaaccgatcgttttttttttcaggaagattgtaaaccgatctctcacatgtttgtaattataatcgcattcaatatgttgtgtactccgtacttgtgtatagctcgtattatagaccgggagatctctggtttaatcagtgccagcgaagtcatgacaagtaagaaaaaaagaggggggagagtcacataccgagtacgactcgccaattatcagttcatagttttatatgaaattaagaaaacaaagaaacgttacaattggcatcctaaacagaatacaacttgatagtattaatttaaaatttattaaattatatgcaatatctataaatgagactccaaattgatttttgttaattttggatttcagactaattaaaacatgaaaaatgtcgacgtttgaggtcacgactacggtatttccatggtatggagatcgtcagtaccagggtatatacgagattgaagtaaaacagatggagacaagaatttttacacaggttcgggccccttatctggcaggtaatagccctactcctgttgaccaaagccagtgttgctcttattcatctgaatcacacaagtacagtgtttgggataacctatctagctgtcatcgacttggcggtatagataaccaacacgtagtcgataacagggtagtcttcctcctcgagtgcgaacttatcgagatcagagatggtgctagatccctcttgccggcctccgcatgcatcatattaggtctgtctaggcttatatctgatgtcgatgtttggcggcgtgtgttggtgtctattctgacttgtgtgttgatttatcctcctagggggctggtatttatacccatagatgtcaccttgtccaagtagaactagggagaccgatatggatacaatcctaatagtatttgtcgtttctatatagaactctacttgtccttccttattcagaacttcttctatatacgaggtatgattttgtataagacttggtatatggtgggtctctccgagcttaatcgattactattgggtatgtggcacccataaccatgataaaaaaaatcatcaataaaactcaaaacctagtacaactcaatatattactccctccgtttcacaatataagtcattctagcattttccacattcatattaatgaatatatatattcattaacatcaatatgaatatggggaatactataataacttacattgtgaaacggaggaagtagttatgaattcttgaattattaaatcctgaaatgcgctaaggattacgtaatttggatggaagcaaagtagatcgatttgcacataaagataagatcacaaatattttttaaaaaaatctatcggacctaatggacacatctccaattgtcaaaaagcgtagcaaaaagaatctaataaagacaagcaagcacattccctaaaggttgaatggaacatatttggcctcatcttttcgcttatgtatatttatcaactaaaatttaaattttcaaccttaaatttgaaaccttaaatttgaagttgttttggggttttttttcatcgtagtttatttttcagcctttgattttagatcgtttagaacacatgtagtataaaatttttatttataaattattttttatttgtaaatatgccgtttggcttagtttaaaaaacaaccaaacgatggggctgattgatccttactttcttgggaga

SEQ ID NO: 50427 - DNA, 7412 bp, Oryza sativa
tgatgtgacataccaaaactttacccccctaatctaagcacacattctttatacttatgttctaacaaatttaacttacacagcggctgggccaaagagacaccgcgccgtgtgacacgctcttccttcgccatcgtcctctcctaacgctgtacacacgctgctggccggcgcggcgacagtgatctgaccagctttttgccgtgcgccggccacccccgcgcaagcgtgcgtgcatatgcactgcacacgggagaacgaaaggatcgagtttagttggatgatcacttcatcttctcgtcgtcatcgctaattgctgcacatttatcacctttttaatcaccaatcgacgagaacatgtggcctctgatcgatgtatcgaccagctgggccagtgaaaagctattctttcgaccggcatcagtagtaaggagtacggtatggtgctctgtcacacgacgattggtcaggcaggagtgtctaatctactgcgattgtttactttaccaaagccaaaccgacctcttctcatcagccagccaactggtagctgcggcaaagtgtgtctcctttgtcgttatactccatccgtcccataatatataagttattttgactttttgcttgttctgtttagccattcattttatttaaaaaaaattagaattattatttattttatttgtgatttactttattatccaaagtactttaaacacaactttttattttttatatttacataaatttttttgaataagatgagtggtcaacagtgtaagtaaaaagttaaatctcttatattatgagacggagggaatatttacttacttttactgcttgctagaattgtgccaaattgttaatgtattatccattttgtcctgtggttggctgctgaatgcatgcatgcacattgcaaacgcggcgtggttgaaacccagccgcaagccccacaaccacaagtggttggatgctgaatgcatgcgcacttgccggcggaagcattttatgtaaaattttgcaatacgtgtcttggatggttttgtcaatcaaacatgtggaacatattgttttagacggtttttgatggaaccataatatgcaagtaacaagagatgattaccaacaaacttaattatgccttcatgattatattttctcttctactttttcgttggatttttgcaagttacgaaaaagcaatgtttcgctttcttcaaagccagatagtaaaatgatcttcaatcaaaaagaggggaggatgaattttttttttggggggggggagggggaggaggaggtgggtgtttggagacagtggactggcagtaggcggcaaacaagggtgagacggtggtgaggctgcctcgaaagaagagataggagggagatgggtggggccagtggtcaggcgtgagatctagagtgcctaggaggcgagggtgattgtgacatttctggtgaaattgctagatgggaagaaggcggggtgtggggctactcaaaggagggggatggtagggctcaccggtgctagaggcagagttggcgaggtagagggggtagcctaagcccgtagatgcagcgcatggcgtgaacaggggcagcgctgtgaagcgacgtaaggatgaaaaagatatggctggaggactacccatggaccattgttgtatgaatcttggcatgacctggggcatagtggcgtatctaggatttgaggtttgggtggtccaacttaccaccgtgcgccgcccttaccaccttgttgttagctagctgccacaaaggcgcgaacatcgtgacacgacgtttgccctttcctgcttgctaacatgtcggcttgactacttgatgacctttcatccttgccgtgttagtttgctgcctccatcttggactcctagttgtcgtctggtatgatgactgctgctatgacagcaagatacacccttgccgtgctattttactgtctctgtctcggattcctaatttttgtttggcgtggtaactgctgctatgacagtgcgttgcatccttgccataccagtttgttgtctctgcctcagactcgtagttgccgtctggcatgatgattgctgccaatgtggcgagaaaactaaaaaaacacgatatgggaccaagacaaccacgcatcgacttcactcttcacatggcaggagttttttattagtttttactatatttttctacaagggtcttaggctaggaaatttttgggttgtccggcttgtagatacgcccatgttggggcattcaaaagtgaatagaatttattggtttttttaggggagtgaaaactagacagccccaaaaacaagctaaggactcatcaaccaacctttcacatcctaatgcacagatacatttcaaaaccgtgtagatataaatatgtgcaaatagttcccttttttttctattatatattgatatcatgatatgacattttaccttcagccagctgattctgcaaaagttttagcattctatgaagagccaagtttcctcaaagagggttgggagtacaaaatctctccacaaaaaacaaggcatagtatgacatatgcacattaattgacatgtgaacaaatataggacgtcaaccagtccacgtatgaaacatccctacacattcattccactgttgtaccaaccaatctacctatatatacatgatcatagtacggattcatctactagcttcttctacaacaataggccaatttaaggcctctccctctaatatgctagctagatgcatgtagtttaatactctagctatatatctagtagctagaaaattaattaagcaaacgaaaaagagacaaagtattctccctcgaaattattttttcaaaaaaaacagagagacatatatagtgtccatgcatggccggggacaatccaggatggtcatcactgtcgcgagatccatggaacgcatctacgcatctcccatgcctcaccgtttggtccctccgtgtgcatgcaagcaagcgtgcagtcaagtccaaatcacagggaaaaaaagttagctgaacgtagctgaactaattaggctactgatagtagaacttattcattcgagtttttttaaaatttaacatggatactcgtatttatagctaactattttttaatagtagacgatacgctcgtcgatataaaatcgtcactggtcataatttcgtcaatactaagattaatctgttgtctagtttttagaagtgtttatataagtaggatatatatgtactgtagaggtgtacatggaatgtttattttagaaaaaaggacggagatcgagacagacaaggggcatgcggcacgcatgcacaacgaactcaaggcgatggtcgatcgatcgatcaaatccatgggtgaaatcatcatgcatgcatggcaagtggacgacacgacatggggctagccggactctgttcgaagttttactccttctatttatttagtactataaaaaatacacgtgcgttacaacgggtaaagtctattttaatcttattattgttatatggtttagttaagatgaaattcactatgagagttcgcttggatatatatatttttaaaaaatcatgagttgcagttatgagtctgatcatgatttcttatataattccttctgtattagtaaaagtgaacgatattaacaacccgactcaaatacggatagtcggacgcgtgttgcgttggtatactatatggaacggagtaggaaaataaaagcatgtgttattaggatgacgtacaaaatttccaggcaaaaacatcttgaatttttataatatagaaaaaatgcccgtgcgttacaatgggtgaaggctattttaatcttattactgttatgtggtttagttaacgtgaaatttattgtgttaaattctcttggatatatactttgttagaaaatcatgagttacaattagaagtctaattgtctcaagttaatatgcgagtttttaaaagagatttcttatacgattccttctgtattttcaaaagcagacgaacttaaaaccgactcaaatatggatttgtattttcaaaagtgaacaaatttaaaaaccgactcatacacgattgacataccaaagtatcggcaaaaacatcttcaatttttataatagtagagatagaaaaaatgcccgtgcgttacaacgtgtgaaggttattttaattttattattgttatatggtttagttaagatgaaattcactgtgggagttcgcttatatatatatatatatatatatatatatatatatatatatatatatatatatatatatatatatatagaaaatcatgagctgcagctaggagtccgatcgtctcaagttagcatgcgagtttttttaaacaaatttcttatatgattccttctgtattactaaaagtgaacgatcttaaaaaccgactcaaatacaaatatgtattttcaaaagcaaacaaacttaaaaaccgactcatacacagatgacgtatcaaaatatcgacaaaacatcttcaatttttataatagtatagacatatatatagattaggtcattctgtactattctcgcttttggattggccatttgcagtggaaacgatgtgagagctatccatcgaaggcgtcgtcttgtgagacgatgcgacgacgaggatcgggcaaagcttcgtacttgcatagctagcggtcctgagtcctgacgcacgcaaattaaagtcatacacaagggggcccaggatcgattggtacgtgcacacctgggggttttctatccacaggatggatcggaagagaacaaaggaaatgcaaggaacagtgaagtgaccatggcaagggggtgccacatgcatggtggtgacctgtggacagtagtggagtagtaccaagtcatacaaaactcgtgttatactgttacatttgcagaaaaaaaacctagcattaattatacgactttgcgtgttgcgtcctatttttaacattgaactttataaaccggacgaattaccccctagatcgatcctgtagtgtggttttggtcctacgtggacgcacacgtggccgtataagttagccaaaacaaataaacatggtagggcccatttcaacccaattgctcttcttctcacctcctatttaccccttcccttctccctccatctctggctcaccgaggcaggcggcggagctagctaaggcaagcagcagaggtgagcggtgctcacatcgtggagctcgccatcgatcttgctgcctccaccggcgagcttgaagccacctgtgccgcctccctcttgagttcaccgttgcgtgcgcaccaagctgcggaggccgaggacgagtggctcgtcggtggttgcgagcctcctttcggcggagcccgagataaggcgtgcgccggcagtggctggcccgtcaagctcatcagcagggccttgtcctcctgtgattgggggagcgatagccgacgccagacttgcacgaaaagatggcgagcggcggtatacacaatagcggcgacaccaaaatctcttgttcctccatgcaatttgatccaatcccgctctgaccccccctctcgtcggccggacgaggatatgctgggtcatggctccggcatgccgggatttgacgccgccggcacgccgggccccgtcgcacagctcgtcctagccgccttgtttgcgttccccgcagatcgacgacgcctcctctgcattgcccacggatcgccgccaccttccccaacctctacatccccgtcggctcctagtcctagatcgataccggccatggccgcctcttcagccgcaccttcgcctttgtctgtgtcgccctcaccgccggtcacgccaccctcgcctctgcctccataccactggcctcggcaggtgccccgccgtgtcgcttcctctcaccccgctgtatggcccacatcaccgaagccctgcctcactgatttttttttgctgactaggctgccatgtgtatgccacgtaggctaaaaaccgctctggattgagttagcgcgggggaggggggagggggaggggtgattcgttcggatttaggagtttaggagggcaattcgaatggccgtaatagttcagggcaacaattcgtaccttttcctatatatatgactgtactatgagcagggtctcacaaacctcacaccatactaaaacaatactagcaaatgacatcgttgattttggatacatgtttgatcatttgtcttattgaaatatgtattatttattttgtgatgagtgttgttttattattaaagtactttatttaagcattatttacattttatttatttgtaaaatattaataagacgaatggttaaacgtgtatctaaaagttaatgtcattatctattataaaacggagcgatgtatttttttttatttcatgtttcatgcatgtaataattaacgcctttgtatgtgtaatgttaaattgttgggtattattaagatgcactactatttagaaatggcctttggaacagacccatccctactcttgttggggataaaaaccgatagagtgatactatgtagtatatatcaccgtccatttcaaaattaatacaggcaatgaacccgccgatgaatcagctaaagaggtcaagttgctcgcccgagtcaaagccactctcgctcggactctcttctattcctctcttcctttctctccattttcgcacttgatccctctttgtgctcagccgctctcttcctctcttccctaacaatctctctccagtgccaccatgtctcccctaccacaactaacaagcaggcaactgcaatggatgagaggcaagagagggaatttaactatttgacacttttacgttcgacgattattcatatacctttccgagttttatacgtaggtatatatttgtcacggatagagaaatttttctaattatttgtcactttcgacacagttgtatgaagtcacatatacacactttcatggatagggcattcaaaatgaccactctacccctgatagccaagttgcggaaagctagcgattggctgcaatataagatacatcagaaatggtatcttagcaaaatgatacaaccatgtattactagcagattgaatagttcattgtgagaaaaattcgacaaatgcaaccagctcatgataacacagtgaaacattgtgattacattaggtgaaatattttttgtggaacaaaaaatgaaacgaattcctttaatagagggtttacaaaatatatgggcgatttgttgcaaaagaatatttcaattcactacaacattagatctttacatagtgaaacattgtgagtacactaggcgaaatatttttagtggagacacg

SEQ ID NO: 50428 - DNA, 4071 bp, Oryza sativa
cccccgggtgaccgagagccatgataatcggaaaagtatttagagcattgtcaaatgtaaagtgactcgtgcttaaatttctcagtaagtgagggctagatctggctggcccaagcttgtgtggctactatatagaccagaccgtttggagcatgtgtacggactttggctactggtcacgatgagcatggttaaaggtaaggcatgccgatgatgacgtgtgatagatggaagatgcgacagggcaaaaaaaaaatatatgtatggctgccccgagttcagtgttattaattaaatccggatgctctgagctaagtgatgctggatatggtgctccggcccctccatatattggtgcctctatattggccactgtcggttccatcagtgatcgatgttcgatttaattcatcattgtttgaagcataatactgtgtcaaatatggtaaatagctgagatctaaatatccataaatttgaggttttacaaaatcctagggcgccataaaatctttgtttgtgccacatgcaggcatatatgctagtactgtctaagattgcaacttcacctacaaaatacaaatcatgctctccaaaatgtattcttagtaagttttattatttatcgctcacctaaatatttctcatttagtccctaaatttcgaattgaacttatgcaaaaattggacaaatttggtaaatcaactgtttcgtcagtcgcacttggtcagatccatatcagaggtgaagaaggaccgacgagggaatgcaagttccgctggtgaagaaagagcatagaaactagtggctgataggtagaaaatatgaatcattatttccctcaactgttacatgttattccataattaaggatagtaaaaatatttattctaaaaatatgtatttatattagagcatacctctccgtggccaaacaactcaaatcctatctataaatttggactagcacttgtctagatgcatagttaggatttgatttttttttaaacggaaggtgtatgttacaaagcgccaacgtacaatatccttggccatgcatgcatgcatatatggagacgaggaaacgctacaaaaataatttatgctgcattcggacgaatgaatgggttgggaacccataccctcagcatgcaaaaataagcagtgaattgccccctcctcccattttaattgcaattgtaggttttcgtatccaatatttaaccattcgtcttatttaaaaaaaatatgaaaaaatttaaaagaataagtcacacacgaagtactatttatgttttatcatctaataacaataaaactactggtcataaaaaaaatttaaataagacggacaatcaaacattgtacacgaaaacccacaattacacttaaaatgagatggagtaagtaacacatactccttctgtcccaaaatataaaagatttttttactgaaaaaatataaaagattttggatggatgagacatttcctagaattataaatgggacatggtgattaattaattatgtattagctacacgaattaaaaaatgtattataatgattttctaaaactactttgttatagaaagttttttaaaaacacgcatcagagaaacgtgtgtgtgggaaacatggttggagaagtttgaaacatccactacgaacgaacttagggtttgtttgggagcttttgacaattacagttttttttaagaatcagaagctttctcaaacagttcagattttaagaagttgtagaatctagtaaataaattaaaagttagaaactgaaaaacctaatttatgtagatttttagaaactgactacttaattaactgtttcttcgaatcaaagtgcggtgccaagcttccgattgttcacgatagataccccacataatccctgtagagcaaattattgggattggatgcctggatctgatcgaaggacactaccatgatgcgaattgagtacttctcggtcagtcgtccctggccccaaaactgcagtgaattgacgagatcacgtacgtgcatactatgccgccggaacagtgctagctagtactccctgaaaaaaaaaaaagataaactcttcattttcgtgtccaatgtttgactatccgtcttatatgaaatttttttataattagtattttcattgttgttagatgataaaacatgattaatactttatgcgtgacttgttttttttaattttttcataatttttttaaataagacggacggtcaaacgttggacacggaaatataaggtttgtccttttttttttaaacggagggagtagggcactcaatctgctagcatattcgtcccaaaatatagtcaattcagatttattaacttaaaaaatacttatgttttaagaagataaacagagtattttttgttccataataacttcatctaatacgaaatataacatgtctggatttatagcatagcatctatatggtatcatcctagattaattaacttattctaaagtactataaaccgcgagttggtcgatctacgtgcaattcgatcggtgtacatgaccgatcgaccggtcgataatggcgccggctagcttaatcgtcgatctagaaattactccctctgtctaaaaaaaggcaaactctagatttttatgtccaactccgtcttatatgaattttgtttataattcgtattttcattgttgttagatgataaaacatgattaatatttcatgcgtgacttgtctttttaatttttttataattttttcaaataagacggacggtcaaacattgggcacgaaaaccagagtttgacagagggagtagaatgcacgggaaaagaagcgagggaaacacgggagtaaagaggtgttcgtactgccctatactgcccgccgaggcgccgacggcgacgtgcaacctgaggaaacgtgtacactgggccggaatgtctaaacgtggcttttactatgcatgcatatgtgccacaccaattacagccgcgtttttcatcgtctgattttcggttttgttcatatagaaattgggtcgacagttttttattttttttaaaatttatagtcagttttctaaccgtttgatctgttttgagatgggcgcttccatccgactttttcctcgtgaagagccatggatgcagcaaatgagcaaaattaaatatgctaacctctgaagtcttgcaaatccgactgaaacgggcagctaaatttgtgctccatgcatgtatgctaatctagcattggcctgccttttatgcgtacattataactttggtataattacaccgtgattagatgttgaccgtaaaaaaatgaaatttgagtgaaatatgtttatatgaattgatcatatatcttttccagatgtatcaggatggcagactccaactttcaaagaaatatcatcaacgctaacatgctgataaattgttgatctgtgtaatccaaaggctagaaatctgactattttttgcccaaatatctgaatagaataccctggtatgtaacttggcatttgggcgcggtttcaaaaaaagttttaaaatagtggcaaacatagtaaaaaaatatttttccaagcaatgatattttttttctaggcaagtaggcttctcaatcggagctaaaaagccgcctctgaaaatgacaaccgtgggacaagacagacctcttaagtggtctgtctgattttcacaggcgataacttaagaggtccacctacaaaaaggataaggggcatttgcaaatttgccactggttttttcaattttacaaggatgcacgtattaaaaacgccacctacccaccaaaatcgctaagttagagtccctccggctctcccctcccacctctcctctcccggtgcagatccggccggagcagcggctagagggcggtggcggcagcggctccaggcggtagcgacgcgaagggtggaggaggcgacggctcccctccctcctcccagatctgatgaaggcggcggtggagggaggtggcggcttccctactctccctccctccctcccggtggcggat

SEQ ID NO: 50429 - DNA, 2557 bp, Oryza sativa
aaaaaatatatcacatacagtcctaaattcgtttttttttacacaggaagtactccatatccatcagtgtcctgatcacttggcatcttcctgtgatacgcgatatcttcacattgaaattatcgagcctttgtggattaattttagacgctagattgatcatcgagtataatttaattttttaaaaagacatcagttagtccaaggattcctgatgttggaggtgcaccacgaagggccctcggccgaacccgccgaaaccaaaaacttaggcggcaagcttataccagaggcgagcggccaagattgaaaaggaaaccgtgcaggcgaaagccgtgactcgagatacgtgggcttcgccaggcaaagatctcgtcagagggccgcataggtgaagacagtaaggcgaaagcctcggcacgagggcacaggcttcgccaagtgccgaaccccaccgtaaggaagcccagcgggctgttgcgcttttgggggagttcggcaagtagatggaccgagccattagagacccatatatgtaaaggacattgtgtgcccctaataatgttcctatcataaaggtaaccatgtaaattcctttataaaatactaaaccttagagggggaacctgtaacagggctataaatagccccctagggccatataatagggggatcctaaaaaaaattcaataagcaatacaattgttttttacttccaaccactgtggagataaccacgcctttcagcatgacgcagttgtccattcgataacacctgagaacaccattctgtaaagttcttatttgttccaaaaattctgaaactaatgatttttttttaaaaaaattataccttgatgattagttagggtattagatttgtcaattcacaccacagtcttgtcacacacacacacacacacatatatatatatatatatatatatatatatatgacctagctatgtcccgatgagagatcatcagttgacgggtgcgaccgtgaggtacaatactcaatgggatcttttttccggcccattataggtagggttccctcttaccctttttagcggggttaccgcaccctgcggtaagatggttaccgcgtaaatcgtgtggtaactgtgagacatactgtggtttcaaaaactgaaaaggttaccgtgcatggtaaccacgataaccgtattacaggtgacgcgccgctggtctctatcacagatagatagttcatgataccggctgattctacttagtgattctttactgcgacagcatctaagcatctagctagcactctttacagctctgaaatttttttcaggtgtagtatttgcacttcattctgagagcccgtcaagaaacattgtgaaagtacatgctggcgcagtccgataatagtatacagagatgttcagtcagcatcatcactgaatattttacctttttttttgcggggacactgaatattttaccttgttcatcaccatatctggccaggctgagcaacagttgtgttgtgccggcaatttggcataggataccacacgtttgttattgcttaaatttgacctatagggatcttctccagcgcggcaactatagcagagaacaggcaacaaagttcactagtgaactacatctaggcaaatgtggatgtgagaacttctgctgcaactgtgtacatatggctaccaattattcgtggcttcgttcggccaaaaaaacacacgctgctttggagatttcctaaggtaattaaatctatgtaaattttagaccgttatttttatctttgaacactttgtcaatatttggagtataaaaatcctttcatctctcaagtcaattttaatttccatccaaccatccattcatgtctaatcactggtagagaaaccatctttggtcggtcgacctatatccacaatagtcccggttccattaaaaatcgagacaaaatgatttttagttccggttaataagaggaagatctttagtcccggttgttgttaccaaccgggactaaaaatcatctttagtcccggttggtaactccaaccgggactaaagtttatttttagtcccggttgattccatgtcaggctgtgtcagggccctatgatctttagtcccggttagtaacaccaaccgggactaaaaacctatttttagtctaagttttcagggcaggataatacatctacaatggaacacattagccgattcttagcacaatgggggaggcatcgactgaagaagctctgaaagttagattttttttttccattgtctttgactggatcggctttcacatggttttcatcattatcatcaaattctatcagaggataggccaatcttgagaagtaatttcatgattacttctttactggaatcaatgagttgaatctttcagacataatatcggttgagcagcaagaaggagaatcggctatggaatatattcagagatttcataatgtctgcagcctatattatggtttgagcctaaatgatgagcagctagcagatcttgcatttcatggattgt

SEQ ID NO: 50430 - DNA, 1343 bp, Oryza sativa
attttgcgctccgcaaatttggtaagattgactacatttttatcttgtttgacgaactcaattttaatatctttactatatttgtctaatctcgtatgatgctgcaagttactccctatcataagatgtttagattagttggttgccaaacgactcataattctccatttggcttcccttgtttatgtagcatcaaggaggaacaactttaaacgagctgctgccggagaattacgtacaattccagtgccacaccctgttattgcagctagacacactgcctcacaacaaagcgcccatgcaatggatagcttattgagagtgaatccgaggatgatgaattggacaatggagtgtcagctattgaccaaatcaatcctccagctattccaaatcataatggatgatcgctgtctgtttcgtctagtttctctatttgagttttgccgaccacatcttaccattttgaatcggctctcgctttactgtccttctacctatatctaaggcgagggtaatcatgattcatccattcagatggcaaagtttagggcagcaaagttgacaccattacctccccatatttccctttttcactgtcatcttcattgccaacaatatcaagtgatactcccatatatttccagttcatattgttgtgcttttctgcataccactttgtgtgtctaacattttagtatgaaaattatttgtgtatctaacatttttagttaaatggatcgtttgtgtatctaacaattttggttaaaaagattgttggcatatccaacaatttttgttactaggattgtttgcgtatctaatatttatggaatggcttgtagatgactcattgctaacaatgaatgattgtttggggccagcattcctcaactcagtctgaagtcaaagataaataacaaaattcaagtctgatgcaacaaatttcaaaacaaacattgctacgcatatactaattaagaaatgacgaacttaaaaatgatttgaatgaatacaaatttagccttccttctgagaccacattgttcaaaagtactttaatgatggtccaagtatcctcgataggccttctcagactctttgactccattagagttgggtccattgctatgaaatacttgattagggaataactattctgtaagttatcaacctcaagtagtttaatagcaaatcaccttttgcaattatatggatcaaaaatggatgaaaacttccctatgttgtggaaagcacaggcagagccgaaggatcgtttcttcggtgtgcttgtactacatcaaagagaatttaccgcggagaacttgcacataaggcattgg

SEQ ID NO: 50431 - DNA, 941 bp, Oryza sativa
ttctaatcatctcattccatttccaaattgttaacattgcaatgtaagtttacatgaaattaagggctcaccccaccattacaattcatgcatatgcttatgtacacagcagttagaggccattgccaccacatccccgcccacagcaaaacaaattccattacacaactagcagcacatgttattccgcattacatgctcgcacggtgagagttccttcatgctggaggaggcgccgttgtcgcccccatcaacaaggcaatgcagcctgtcaagacagtttgtctagctacaggaacaaggagtggcactggagttgtagcatcaagcagctcactaggaattgatgccacagtttttggttggctcatatgcagcaggtgcctggtggcacctcatcttgtgaggtttgcacgccattctccagcagcaacagctcatctaaagttgttcctccttcatgctgcataaacaagggaaacccaatggaaaattatgagttgtttagcaaccaactgaactaaacatcttatgataggtagtaatttacaacatcatatgagattagacaaagtagtaaagatactaaaattgagtccattaagcaagattaaaattgagtcaatcttaccaaatatagggaacacaaaaattcctttgttaaaaaaaccaaatttcatatatatttgtaagaaaacaaatactttatcaaaattgcatcataccaaaattttagtaatacatatagcacctagcagtaacacaattcgggtaccaatccaaacgtatattttgcatttcacccaaccaaaatttgtgatggcatcaaaccaaaccaatctacacttaataaaattgagttgtggaatatagattgtttaaggaaacaactaagataggtcctaaagatgatgttacatacaaacaattaatcatgctat

SEQ ID NO: 50432 - DNA, 1271 bp, Oryza sativa
aaaggtgtaggttctaagaatgaaaaaaagaaaagcaaaaatcccggcttggtgcatcgcttcgaatcgagccaatacatcaaacagctctccatcatcactgagatcaacatcatctccatcaaccaaacacaatgatatcaccgtcatcctatcaaccaaacacgatcacaaactcaacaaaatcacaaatacaaatacatagaaaacgacattgtcatcatcgtcgatcccgcctcccccgtaagcacaacagtgatccggtcgcctccgtcgtcgtggcggcgtcggtcggatggagaagaggaggaggaatgaggggaggcgacggttaaggaggaggagtgacggatctagaaagaggaggagggaggaaaaaggaggagcggcggcgagggctaaggaggaggaggaggaatcccttcttacgactataaagttatcacacggagttctggacaagctctcgtcatcattgaattgcatgatgtatgatcgctgaccattcacatgatgtcacactcgagcacatgaccaataatttatcacggacctcctgttctttcagaaactgtactcccgcttcttttgcaggtcatatcactcgcaaacgccagtgaagcaactcccattagttacaagcagtgcgtgcgtgcattatcacaagctcttgggctgatgcacaattaatgtgggaaggtaaggaataaatgaagttgtacaattatatcctacctcttccgttccataatataaaggattttaacttgttacttgtactgtttgactattcgttttattcaaaaaattttagaaatattttttttgatcgacttactttattatccaaagtactttaagcataaatttttttttatataagcacaaattttttgaataagacgagtgatcaaacagcgcatgaaaaagtcaaaatcttatattatgggatggagggagtaatattttagttgcacgaaacttaactcaatcaatcaactactccctccgtctaaaaaaaagcccaaccttgacatggatgggacatttcgtaggacaacgaatcatgacagggagtagaacttaatatcaaaaagtgattaaagtttgtgaccattttcatgttattactcccctcgtctcaaaatataagagattttacaaaatgtgacgtactccctccatctatttttgatagtcatatttctgaaaaatttatttttgataggcatatttcaatccaacaacctatcatcttaatgactttctcg

SEQ ID NO: 50433 - DNA, 1316 bp, Oryza sativa
ctccgttgagcgacaaaccataggaagtagcgacactgagaggggcaaaaaagcgccagattggtaggtgctaaaatgagatcctgcctgggaagagggcaaggtaagccgaccgggtagagtacgaccccgaactctcccacctctagatgaaagaatcaggatggtcctttgagagagttgttgtctgcaacaacgaccaatctgcaagtattgcagcattgcctggactcccaaggagccatggagatcgcggatccaacggttgttggccaacgcatcagcgaccaagagctttcggcggacacgcaccgggacgcgatcataaagctcaggtgcctaagagcgaaggctcgaatcctgtagccatctgtcctcctagaagaggatcgacttgatattctcgataatctgcccatttaagtttactgctcaggccatgacatgataaaccaagtggctggagagtggcctttgtatggtagcgaatctatacgagggatgaatctacatatgtgttataaatgtttttaaacctatatgtatattagtgaatctagaccatggacggagaaaacaatacgttatataatatgaaattgaagaagtaattaagtcactagttcaatctcatttcctcagaagaattatccatgaataagtccaacacaactaagatatacacactacatatatgaatgattcagtatgcatccgtcaacatagtacaatatagaaattttctagtacgatgattcttgatatgagatatgctcagattcgtagtaatatgatgtatcacattctgtattgcattgtttgttatattttgggatgtatgtagtagtttatttttttgtttcaatagataaataattcagtagctcagcctcagatgaaatatcagcagatgaggtcagtcagtcccatttccaccacacagcagcagcatccatacatttttctctctttcttttctttctttttatttgttgttgaaaagagcatccaaacatgcacgcatcaacatccacactccacagtgtggctgacgccctgccggtttctgccgcctcacgtcgccgcgagcgccaccacagtagtactagtacactagtacacgagtcctccctccataataataataataataataataataataataataaaaaaaaaaccgagtctccgtgtacaacgtgaccgtccatcttatttgaacggagggagtagcacgcacgagcacagaagccacaaaaaacgagttcgaaagcgaggctgcctttttggcgccatccatggcgctgggctgcagg

SEQ ID NO: 50434 - DNA, 813 bp, Oryza sativa
aattcctgcagccccagctcgaaattgaagtttactctgtaggaagcagagatttagccttgcaaattcctgcagtatattgagccatcactttcttttacagcaataacttcgctcaaaacaagtttgccttttttactaattgttgtatccttgttcatcaggtgctaaaattcaatgggcaagaagcactgttttctgctcttcagagagtcaaagaaggtaatatcatccaagttcttatagttagaatgttagattgctgcctgtacaacaatttatttcttggatacaaaggacaattttcactctgtttctttcacatattactgccagcagaacctgaaaagatgatcttatcgtcaccaaatgataaaataaaatgcttcatgacacgatggccagaacatttcataccagtttacttatgccacaataatttgtgccatttgttcactgcctgatccagcttgttgattacttgtgcagagttgatgcttctgggtttcatttccttcctgcttagcgtcttccaaaaatttatcaatcacatttgcatcccggagagtgctgcacatctcatgcttccatgcattactagagagacgtccgagaccacagaagatgcttccaaactttgcaagcgaaaggtaggatgtgaactatggagagattttcttaaacttttgggaatttttgataaactccaccacgaagtgtgcactctggattgtttagctttgttatttttcactaaagaatttgtttcttgtgggtatcttttctttcttgaagagtagaacaaacaagaaa

SEQ ID NO: 50435 - DNA, 3418 bp, Oryza sativa
tcctatggaatgtctcaatccatataagttttggaggaatttgaaaatgaggttcaacctcatggaaatttttatttgtctttatctctcctcgaagttcatgcatctttcacgtggtctaaccaaacggtcgttccttatttttcctatgtgttttgtagttctctattttacacttttattcctattaaaatattgtgttttctatttctccattttcctaatcccgtgtttcaaagaagccttaattattgcctgctgaactaacttgatatatctcataatattttcttcctcaatctcttgtttacttcaagagtagacaacaattagctagcagtagatgcctagcatgacaacaagttaaaatatgatgcatgcatgcatgacaacaagtaacagctgtgcatgcaaaaccttttttgtgaagcaggggcagtgcgagtggaagcaagcaaggatatactatgctcatatgctagcataaaaaaagaagcttgagactttgatcgatcgatacggtggtgtgcagtgcatgcatacaggaggacagtacatagctgcaaggactacacagttattagaggaggcggcgatgatgatgatgatagagccgagctgatacattccatcgatcgatcagcagccaagcagcttcctggttcgtcttcttcctcctccctctgcaactttattccattttgcattgctctctatacccctatagtactactagctgatagtactcctgtctgatgtgagtgctcaatggctcatctatgtttgtctatctttcattggatcgaaaaatggacggctgggattagatgagggggaggtaggcaggggtaggaagagtatatatgagagggagagagatgagagatgccattgcatgcagatgcagaacgggacatgaggagagacagatgattgtacaagttggggctgtctggtccctgtcgtcgctaagctttgcgtgtgccctcacactcacgtagtacacaaaaagagagacatgggcctatagcttgcatctggggttaagcctagttttttttttctctctctctgattgggaggatggattatctgattttgtgataacatttaagggtgttcaaacgaatgagttaccattaccaagttgaaatgttgtttaaaagaagtcttctaatgaacatatatatagaaagtttcagcaaaaatcatactatctccttccctatatgtttgaagttggttagttcatttttttagtccattactcttcaagtgtttgggtataatatgcccctgctaatccataattcgtaaggggaaaagaaattaataagaacgggtagtatcaaaataatggaatactcctcttgcaaaatggagaagctcaattatctaattgttttatgatcttatcatgcatctatatatatcttattgaaaaggatggactatttgtttgtgtaatagcaacatttatttttttgcagggtaaatgtggaaaaacgtacgaaaatacatgaaagtttagaacaatttgtgtcgtaggaatttcattgcaatcttcaaaatttaaagacatttcaattcctgccatccaaacggtgcccaaaagctgtaaattaggttagttcattatataatcctcggctacctcctttgtatatatgaaattgaacatccgtacttggctagacaatatatgcattgtagacttgttgctagctactccatttagtctaaatgatagacttactaaggatcttatggccatatgcatgcgtctatactctataccatgatccgttgatacatctcatcttttgttggttgcagccttgtagacgccttttatattattagaccctaattgaggcccaagggtgcagctagttaccatgatcatagttaagagaagccataaacaactaatcaggggataaatattaattctagcataaacatacttggggtgtagttaatggagctcaaactgttcaagtctcctgtcatcagctaaagacacacgaccaacttgtcaaggtgtttgaaaaacttttggttttttactagtacgtgttatcaataataactatggctataatcacatgggatactttgtgccacaaaattaacgaaacaaccagaaaagtcaccggtgtttatcggtgtcataacgtgttggtcatacttacatcatggtgttaattttctacaaattagcagtttatcagggtagctctagggttaattatgtacatattctgaataagagcaagtttaatagtagagctcactacttactattagtcaatgttatattagtcaatgttaaagttaacatgtacagtaggttggctataaggttatctttattttcttcatcctctctctttctctcaccatgaatttaatgcatatttcttagagtttgtgtgcagttagctcttgcatgagagccaacactccccacttttatttatctctcttccacataagcatatagcttgcttatagcctactattatccttgctctaacactagccctgctaggtacaatagtcaatagatccgtccatatatatatatgcttatacgctcaccgttcatggtgagcttgcatgcataacttcatctattctgcgtacactgacatggatatatttcagtagaaatcgtcaggatgtgctagttttgcatgtgtcttcatagaaccaaaaattttgaacactgtttatgtgatagaattttgtcagggaaataaaacttagcaacaaaattaattgcctgaagggggtgtaattcagaattttagggttactttggaccacaggtttttcaaaaacactgtatcaggaaaaatatattttggagcaccctaacactttaaatcatatggattgaaaaaatacaggaaatctgtaaaaacgactgtttacatggagcttaagagagatggaaaaaaaaccttacgttaaaatttctctaaaattcttatgttttgagccgattaagaaaaaacataaaatttttataaggtcattacttttatctcaagaaacatataggaatttttttcataagattgagagcttttaaaattcctttaaaatacttccaaaggagcccttagctagatatagacagatactcatgcaagtaaataaatctctctttcacacaaaaaggatggacccttcttgaccattcccccccaccaaattaagtccactggataaaagccaccaaattgcaaagtttatgctcactttgccaccctcctctcctcctctcttctccaagctttagagagagaaacacacttgttcttcatctacccttctcctctctctctctctcatctggttctagctagtactagctgctgcatcttctactgctgttgggctgcaggaa

SEQ ID NO: 50436 - DNA, 845 bp, Oryza sativa
atagcatggtgccagtttggaagcttaacattttccaggaccttgagtcattgactagttctgccatggcatgatgtccacagccactaatcttaaaactcctaattagtgtcctatcatgtggatccattatctaaaaaagtgctatcatgatcattagtccattacatgatcgaatgcaacacaagctgcatgcgacaggaaccgacaactaatgtccaaaccaattaaccatactagccaaacttcaaagatagtataacttacccacgaaaagctatcttgaggagctaatgatcctaaagccttaaatagttaaattgctatctaagagacggctatctatgcccagcgaaggcaaaatttagctcatcattcaagaccattcaacattaatgcatggaagaagctaaaacttttttttttttgctgactctactttgctgcccccatttactcaccttctgctctcgaattcttctcacagtaaaagaacaaaccccccgctactgtcccagcaaaccagaccagccatggcgtacctgaaccaggagcggaggaaggtatcgccggcagagcagaaatgccgcctccggcagccctgccctacagctcacagctacgacgtggagtgagatcgatcagcgaggaagcaggattcaccggctccagggttccggtcactggaggaagaagaagacctctcgcctggcgctggcgcggagacagttagcgtggcgccggtgaggggcaggaggcgccggcggcgagggacaccggaaatggggaccgggaggaggcgaggtgtgcaggctggaacaatggacttcgagcttgggctggat

SEQ ID NO: 50437 - DNA, 1371 bp, Oryza sativa
aggttatggtggtacaaatttggataggatgtctctagatgcttatagatgatgggcaatctcaagaagattcccccatatccctgcccacaaatttggctggccttttctggctcatatttcgtatgtattacctccgtcctaaattagttatcactctaactttttttttatcattcgtcttatttaaaaaaatattataaatataaaaaaagataagttatacttaaagtgcttttgataataaagccaaaaaataaataataatttcgtaattttttgaataagacgaataatcaaaagttacaaacaaaaacttaaagggctggttttgtttgaggcctaaattagacttaccaatatttggcaattccaatagtgtttagtgtctatttggtttgaagccaattttggcatgcctaataaaataggccatttcaatagtgaacttaggctatttttacttcaatccaaacataattttaccttaccaaaattagtcatgccaaaacttaccagaatttggcattgacaaaatttggtaaggcctatttaggccacaaaccaaaccaacccaaagcgacgagtattttgggacgaaggtagtattcaaaacacatatattccgaataaaaatagatggacagcattggacatttggtgttgactttagcactgtgagaaaatgacaactcagaccagggtttcaaaatgcgaacgatagtcgaaaggcatatccctatcaaatttatcagtaaccgtgataattaaacggttgccgacgaacggcggtgaatctatatttattttgagcttggtttaaacttgatttaggcacgttcgtttgagccgttcagctcgcacgcgaaatgagacggggtgattagcaagggtaacaattataatttttaaaatatatactccctccgtcccaaatataagtatttttagttatgaatctggctaaatgtgtgaccagattcatagccaaaagttgttatattttaggatagagataatacattatactatatttatttcacaaaacggtacgttaagttcggttgacttcgtcaatcccaaaggatttatcagcccagtattcgaagatgtttatagaggtagggattacatgcgtgcgttcataggggtgagtgtgcgtgtattgtgagtgtatgtgttgtactatataatttttttttaaaaaaacaccgtttcgagttgctgaaaagaactcggtcttagtcttattgcctgttgggtactgaattactaggatttagcaattttctcgttttccatgagcactcttcctgaagttctagccagtgtattcttttcaagaactttttatataaatgttttctttct

SEQ ID NO: 50438 - DNA, 2929 bp, Oryza sativa
ctgcacccccaaatctcatttaggccacctttggttattggttgtttaggtgacccagccggagctcgtgggaagccaggaagtggttacggttacggtgttggcgtccgtgtggactccccactgggacctttgcgtcttgagtatgctttcaatgataaacaagcaaggcgatttcattttggggttggctacagaaattaaccagagtatcattgtgtttgtcggcgtgatccttcatttgattagctgctgttaggagatagtaccattacttccatttctttgcggtatcaatatgtgaaagccttttgcaaagcaaattttgtctgtcccaattcccttattgtaacatatttgtacatttttttcaatcctccctcttctcatgtagatgttcttgaaactgaggagaaaatgatcccaccaggtaattactcatgacttatggttgggtgaagttccctgggataatttaaacaagttttgtcgttgtcgtaggacaaaattttggatttgtatcaatgtcaccatttgtattgtaatgttagctggagaaatctgagcctctgctattcagcttaaacaaaagctatcataatctgtctgatgacattgcaagttcgctccaaacaaaagctgccactttgagtctgtccaggaccaaagccacgtccgcacgcatgggcctgtattatgtgtcatgagaagttgcagcatgcatcggatttcctcagatctcaagatgaatgaaagcttcccaaaccaataaaaagctggactgaagagcactcacggaatcttccatccatgcaatggggacatgctagcaggtacgcacaatcagtgtctcatcctgtcattttccagctacaagttatccttttatcttaagatatactcaatacaatttcccgagctgaaaatttcaagaaaataattttctctcttgctgtctttggtaattttcattcttcttacagctacaacttacaatgttgataaaagttcaaaagattgtttgccttcaaagaaacatctgtgctgttttgggttcaggacttggttattgctactctgcttcatgccatccatgtgctactgcaaaatgctaccagtgtattagcatctcgatacatgtaatcatgcatatgtccagcatataatggattgacaattcttcaagacctacacctgcacaccattctgtcggcattattttttccatctctagaacttgcagtagcccaggcgcccagctgtccttctgcacactagtagatcagatgactcacctgattaaattagtttgctactgaatttgttcatttggtcccagtttacccctaccttcctgccatagagtttggtttttaatcaaacaagtcatcttgcaatgcattgcctgcatgctgcaggttagtcatcattgcacaggcaaccatcagcaggctgtcccatgctgataatcaaatacccaggagaccaatctttctgggattcatgcatgcatgatatggcctgcagatataagctgacaagccagatgcagccaacgattgacagtgtgtaatcagtctattatgggaggagaccaacctgagcttatcatctccagtttttcagtggaccgatcaatcggcgattttcgcgtttgtgatcatgaggtttcctgcagattaatctcccctggatgcatctggggacaacatggatggatgcttctgctgctcagctgctgtctattcatggtattctctcttgccttcttgcagcggttttcagaggtcactccagtatccttcgttaattcgtaggaactagggaaatcaaatcttagtacaccgtaatgctatgtttccaactaaaagaattggattattgcaccaaatatgggaactaactagctaggagtgcctcatgattactgaaaaacccaagccacattcttacagaacactttataatgtcaataattacacttcattttgcctgcctagctaggtagctagatggcatccaagaaaatcgaattgaaagaaaaaaaatagcaagatgccaaagttgtactactacatgattaatgcaaaacaaggtcacaacaccaacttttccatgattaattcaaaatcaagatgatcacaacaccagcttttccaagccactgttgcacttatctgtccatcagggacagaaagcatcaccctctccacatcaccagtgcacgaaccatgatcttccatagattggcatatcaaaaggcaaaagctagaagccagtagtagtgtaccaccaccaccggtgtgtgtgggtatcttgtagtacttggtgtgagcgtgatatgatgcagcattgcagcttatctagctcagcgtagcctcctagaaaaggaaacgggaaagcagcctctcatccagatcgaagctctcgctatcaatcctgggtatctttgtgtactacgctagctgtggcgtgtgtgttcatgcatcatgtgatataacagtgtagtaccatttgtggtctactcctccttcttactcttactccctctgtccatataaaatcaaaccctcctcttttttactcttactccctctgtcccttataaaatcaaatcctagcatcccaatgtaacattagtggagagtgaaaatgaccaaaatacctcttattattaaaaaaaatagtaatgatgatatgtaggtaaagaatgttgaaggaataaaacttctcattttacttgctgggagtaggtagaatggtagaagttggtttttttttggacaaaattcaaactccagaagttgagtttttttggacggagagagtaaaatataagagattttaaatatatgtaatatatcatagtactatgatcatgtgttcagattcaaagtatgtaatatatcatagtactatgatcatgtgt

SEQ ID NO: 50439 - DNA, 2461 bp, Oryza sativa
atcggtcaagcatgcacagttcagtcacagcgcctttccagtggcgggagctagaaacacttggggctgtttggttgtatatatgctttagtttaccaacttttagagctaaggtgcggtgtggtatgtcataatttgtttggctgaaaaaaactcttagccacatatatagtggtagatcaaaaaagttttagagcatggggaaaaaatattgtatcaagtgtttgcaatgaaaattttgcttctataaattgaaaattaaaacatttaaatttcattgtgcggccacccgaccagcccggtcatcgggtggtggagtggatccacccctggccacatgttaagcaaacctgattgccaaaggtttggtatgaaccaaacacctgataaaagttatttatcggtatttttaaaatgcttttttgctaaagcatagttgtgcaaattttcaaagtgtcatgtcccttcattcgatccaaaatccctcaaaactcgaaagtaagattaacattaggcatagttggaagatttttgaattacccttacctaactcttgtttaatttaagacggacttcattcccccaacacacgttctctcacaattagagaaggacccacaggtgacggtgtctttgtctcgttggaatccctctcctcttcgtccccggtggttgccggtgaaaggattggggggagggggggtccgggggagtgctcaagctcgtcccatagtcgggtaaattatgttacagatcctttgtccccctcccccacctttcttgtaaagattaaaggagatgtcgacttctgtctcctttgtcctggcggtgtcatgccatggatggatctgctagacttggtctcggaagatgccgtctagctagcaaccgtcaggcttagaaccgatgctttggttatcaacatctgtaacatgtagtccttcaaatccacaagcaataaaaggttacgccggccattcttcaattttccaatgagcagacctgcaagggttggcgctcttccctgtggactttggtggtggatctcaaagcgatgattgtggttttcttgtttggccatgaaagcttcaacctccatcatggaggccttgattgggtttgcttcttgactatgccctttgcagtctgccatggtttcatcaccatcaccgtagacactggatggaacaatggaacatcagctcggtggaaggagttgaaggacctgatcacattttacttttctttagaggactttttttacatgtttcaaaatgttctatgaggggccttgtgtactcccaattgtgttttaataaactaccctgaggttgttgcctcagtttattttttaaaaaatcaagttcctatttaattagtatttagggcttagaacgtagaaatttttaagattttcatagaactagtttaatacatgcaaaagaaaaattccaaagaggtcttatagtagtttttaattttgaagtgaaatggttcaattccaacatacaataatttagattttagaagacttcatgcattccaacctttatattttgctaaaatctcgttttcgaaccaataattgagtggatttggtcgaaccaataattaattgtaagacaggtttgtattttgcatgtgccaaaatttgaggtttagtgaatcatgcctgatgatgctgcggtagacgcgtagagatatgagtactttatgtaccacatgtgtattatttggcattggagtaagatttttcacagttcatttgaacatgtgtcgaaggaggaaacctgacgaatatatatatatacattggtgtgtgggactttcatgtaattgagaagttgttaaggttttattcgcaattcctacatattaatttccttgattcaattcaaaacaaaagctaaaagatgtaaccatgcatctctcaattggtgaccacgatctcgatcatcttgaaacattcatgatcggtgactaggatcgatgatcatcgatctgtccctctgctacctagtacgtgctgttactgtatctaaatttatggctctcactattgatctattccatccataccttgaaccctaagtgctgtcagttgggggttgcaaagcttgcgacgacccctacagtaattaattggggaattaattaagctggggagaaagcagcacaggacaatgaatgctgctactatttggcatttcattttcaattaatcaatcaagccgtgtccagttgaacattgagctatactgctagctatgcaaaaacagtgggccctggctgcaggtccattttgttgtgtggcttgtatggtttgactggtgaatatatacagcttaggaatttacaaaactgtacttctggcagataattatttgtcagagaaagtagatatgtgcatgtgagctgttcaagatatataaaaaatgaattttctcacatgtatatatgt

SEQ ID NO: 50440 - DNA, 1299 bp, Oryza sativa
cttagtataaggtggcacctagttgatcattaggtctacaatatagcatatattaagttaacacttgcctttcagttaaagttaaaaacggaggcatcaaagaaaagcaaaagacaacaagagttccaagtcttctctcagtgattaataaagaagtgctatgtgaaattcctctgcattctgctgagagattaaaatttaaaagaagcagggaatgttagcaacgattctgtcttgtctaaccattaccaagccccagtattttctcctgtagtattacctaagttttgatatggtaaaagaaaatttagtgatgtaaatcttgatatggcaaaagcaaataatgtgatatcactataagcatttagcagattccataaatcatattttgtgctgcgcctctgcgggcagcaccccagccatctatctacctccatagatgtacacccactaatttccttcaagatgcttctcaattttgacaaaactgaatatagaagcaatcaatcaatgcctatcttaccaaaaagtacacaagaaaaagaatataacaacatgagccttctttttagatccactgaccctctaatcgaattttaattcgagtataaaatcaaattcatctgcttaaaagtcataaaggtggtatacatcaatgcaacttgatgtcataagcttttaggtgaaaacatgatgtctgcaagaaataaaaacatataaagaatgtttacatgtgtatctgttgagactttttaaattgttagtcattaatttctgatgttttcttccataactgctgacaaagtgacagttatttttaaatgtatttacttatactcttccttgtaacttctataactcgcagaaacattggtttctatcctatggaagcaggagcatattttgcttctcttctgttacaagttttactaaatgcaacgaaacatcaatattcagaagactgaaaattatgctgagaattaatctgccacatggggtataatatcaatatgcaaccataaataaaggattgggaaaaagaaaagggacttgcacaaaaacaatggcttactgcctcaacaaaaacatcaaacttaatgtttcaattaaaacaggagaaaatagaagctgcatgttcaatgcatcatctaataatttgtttttttactattaccttagaatcacatggttatagtaagcatttttttttatagatgaggccacattgataacttccagtcccgatgaactggttcactatgaaggtaagttctcagctgtgcccagtagaataaatct

SEQ ID NO: 50441 - DNA, 1987 bp, Oryza sativa
ttaattaattaactttctagctgcctccttgttagagtatgcatgataaggaagattgatcatgctctaccataaaagctttagtatacaagatatgtatattggataatgtggatccgacctctgggctctaacacttttattaatttgtctctacgaaaattgtattctttaattagaaacagtatctagctagtagcgaccaagcttattaattaagaaccctacaaaaagatacatatatactagtcatgtatgtttccagttaactaactatatatataagcaccatttgatagccagactctatatgaccaatctgtggttcgtatggtgtgctgcacgactgtttgaaccaattaaatacagctactctgcttgataacaactaaagaatttatgtttgattttgaaaaaaaaaggtactatcaacagccattaattttataaaaatatatacctgcaaaataggagtaagtatgaaaacaaaaggtacaaaaatatgtgtagaaaaaggtagaaaaattatgataactaaatacactcagttaaacctactcacccgaggtgttcgatcaagccctacatattactgcaactaataattctttttagtggtacgtggtacctttgtcaattttatatgtcgatctttcgaaaagtgctatacagtaggttatgtgttttgagaaagaaaacgtagtaattgcatgtgtgtttttgctcgttcagtaagaaatctgcctttaatttgtgctagcttatgctagctggccgatgtgatgttacgtgtgcatgatgcttgcattgctgttggcaactgtgtgtacacgtatgtgtcaagaatggttaaagaaaatggatggatgccaccaaatatgtcatgatcctatcattgacttatgtcatattcggttaatttagtttatactagggcaaatcttttgggtcaaacagtactttgcctttggcctttttggagattttgcatgcgtttttctgctctaattaaccaaactatacgttaaattgtttaggagaaaatcaagcttgcgtatgaaaaattctgcaaaatctccggaagaatatatgagataataattagccctagaacaatgtcacatccctttggccacaaaatatatacgtcagtaattaattttagaacttgtgcaatcaatagatattaattactccctccgttcgaaattgatctacatatagtttttttaggttattcctaaataatctacatatttatgttcattcattaagtctatttgctatttatgcattggattatgcattggagtaaatagacattgatgcatacatccatgcacacaagtatttataacccacatgcaatatcttaatttgctattggctaggaaatagcggggatggtgcatgcatcgagtttgttgctagagtaaatataatatgagataattattagtttttcttaatcttggtgtacttatgaaatatgtagatcaatttggaatggagggagtaactttgacaaaaaaaaatattctaaagtgtatatatttttggacatatggaacgatacacgagtaattaaaattttttttgttcatatatatgtttataataatattacatgtttatacatatttttgaatatataatatacatatcatgatacacagttgagtgatcaaaataggtccgatatattgattttgaaaagtcaaaatcagatttttttttctagaggttgtagatgtgatatatatatccaatgactacagatgacgtatgcattgatcacaaaatcaacaaaatttaaagaaacacacatatatatagctaggaatcacacaaagatattcacaaattaaatttagatagtcatcatcagcaaaaagcctttttcatataatattgtcagcaaatacttagtagttagtcagttatggttaggtaaaaatgtacagctatgctgctgcctgctgatgtg

SEQ ID NO: 50442 - DNA, 586 bp, Oryza sativa
ctagtataagggcttacacgtcaatcaaccttatcaccaactctttatttttttctttaagaaggaaaaaggattgtgggggctagtgggcccagagagatcacatttaagtaacaaatatatatatatatataaactaaaagataatatttatacaaattaatggtactgacgggttaatgatatttttttaataaaatcctgttacatatggttgtaattgtacaggtaatattatatatatatatatatatatatatatatatatatatatatatatatatatatatatatataaatgggagcatatgtaataccttcaaagaatcatgtctactatctttacattaaatgtaattctttatattttaactttatgctaaccgtacatattgtcgtcactacatatatacgcaaccatgcatgcgggacgtacaaggaaatgaaaaagatatataatagtcgtactagctgtttacatacatctgaaaaatattactctataatccatttcaaaatattaggacacaactattttttttctatgttttataacacaagacgtgcatatatgcatatacatata

SEQ ID NO: 50443 - DNA, 643 bp, Oryza sativa
ttcctgcagcccgatggacatatgattttttttaagttcaatgatccggtctaacctctgagtaagagcctgctaagttcagaattgacaatgctggtccagaaacttaaaagttgagcgagagaagggggcatatgtatgggcacaagaatatgattaagtggttgcaagaactaattttcccactcaccctccaaagatattctttaaagttgtctgtcacagtttaccttcccaactatatgaagaataataaactggatggagaataaaaaatcagcatggcaggcataccacctgatcactatcaaccggaattacctacacaacaagtttctgcttatcttgcccatatccaggagtacatcatataaatctttacatggatctaaattgattaaaaaaaacataaccaaggttcaggagagaactttgcagtgctgcgaatggccaataaaatgaaacctaagttactaataaaccaattaaagtaaggagccaaaattactaaaagaaaagagaacaaacagatgacattcatttcggccatcatttctggctcccatatcgcaaattgtaatccagttatcgcaatgacaaaggggcaattactagtacattattattgcgaaaatttcatgaa

SEQ ID NO: 50444 - DNA, 1715 bp, Oryza sativa
ctgcagccctgtcagttaggtggtttttgcttacgtgatgctttttttccctagaaattcttgttggaaaaaaactcctgacgcttagttgattccaatatattggagttttggaaaaaaatttgaaaaattgtcgttggagcactctaacaagagtatagctcgctctaataggcacaaattccatgggcgtggttcttctttgtttcgaaagataaacccggtttattcaggatccctttgtccaaatgacacaaccaacaatagtcgggtggattacaggtcggattgtcctgacgtcctcaaactgccaattgccagtaaactaggattgtcgccgcccttgagtgttagtggaactagcagaggatggggcttgcggacgtagtcctgcgcagccgatggaaggagtttgtggcaacggcatggctctcctccctgcatgtttagctccagcgaactccgtcttcccgcatggtctaccccaagctcccgttcgccggccaacccccattccttcacactaatgtttgtcattgacgtcacgtcaccggactcatggtccttagttcctcacctagcacatcgtcaagttcctccatcgtcgacgtcgacttgtgaagatccatatatgctcagtatcctcgagcttcagatgtgcgatgaacatcgccgccgagcttcatccttaagctctatcatgctacatccattgtatgcgccggtagaaagagacaacaaagatagcgtgggaaggaagatggtgttgacaaatgaagttcactgttttttatgttttaaaaagttgattcgactaccatataaatagcacgtaatcaaagccacctcgatcttgtagagggtataagctgaacggtttagatacccatagaggggttagtatccagttttgaagattagaggtgagcgttagacaaacgcaatagttaagatgggtcaatgaacttacggctctatcttttcgcttatgcttatacttattagccaaaatttgaatttttaaccttaaatttggtgttgattttgggggtttttttatcgaaatttattttttagcctttagttttaggttgctaagaacacgtatataatttttttttcacaaattaattttagcaaaatgatggtaccttatccgagtatttatgagagtcagatagatcgatatgtgtgcagcgtggacctcactgtagagtgtaaccgcaaaatataccgtggttttaaaaattagaaatgttaccatgcatggtaactacgataaccgtgtggttttgtaagtacttccatctcgccacctttctctctttcatctctcttcccgagctatggcctacggccagcgtgagcttgtgactttgcctctccattcatctgactttgacgagattgggcccttttttgccatggctgtgaatgagaaccgcagaatccttgttcgagaaagagagtaaaatcgatacatcatatgcacagaccagccagctgtcgatcggcaaatggcccgatccacaaacttcaatccgagcaagcacacccgtccttggaaaatgactcctcctaattacatgcaaatcaccatgctttattaattactaattacatgctttaaacgtaattagcgcgcatgcaacaaacgaagagatcgaagcaaagtgatggatgatcgatcactcgaggggatcgccgccgtcggc

SEQ ID NO: 50445 - DNA, 1036 bp, Oryza sativa
gggtagatgttcctctttagggggagctagtgacgactcattccctggcgatattagtgataagcaagaggtaagttgcctctcttacttccctttcagtttagttgtgtgtactaaaaatactatgaaagcaggcacattggatgtgaggtaattatgataaatattttgcatgatatttagattaatactgttatatagcttaagttgattagcttagtgttactaatcgtttatttgggtttctctcaaataagttcaatattttttctcattataaaatctcagatacagtaaatgtgtcttgtagaatatgactgtaaaggctctggcaacaccgctaagacagaaagacagcaaatcgacaaccccaaaaacaaaggagaagaagaagtcactatggaagaagcttaaccgtgagagggcaggggtgggtgatagtctatcgcaacgtttgaagatgtgcctcagtcattcttctcgtcacaagagagtcaaatcatctgggatagtgtaacaacttattagccttgacaaagtccatctcaacgaatcactgacactgatcagttccgtgaacaccgaatcgccttgatttgattctgacttacctgctggcactaccagtgccagattgtaacttgtaacactggtgagtacatactcgattgccatggctcgtgtcaagcttcgcaggagcccatgagattgagcgacacgcccttgtatttgctgtctcctgtaattgcgatctctggctcgctgtttattttccttttaccacttgaatgctgtaaattacaatgctgtagtgcaagagtgcgactccagcttgttggtgagatgaaagggatgtcgtgcgtcgtttttttaactgtgtcctgttcatatttatttaatcattctgctatttaactttactggaagggacggataaattggatcggaggcataacaattgttgagctcttgaaagtttatacccaaaaattgtaaaaactctacccaatttttaaaacattcaacttaaaatttg

SEQ ID NO: 50446 - DNA, 7430 bp, Oryza sativa
attaaaaagatgtgacggaaagttgaaagtttatatgtgtagtaaagttttgatgggtttgtgtgtaggaaagttttgatgggactttcttacacacaaacttccaactttttcatcatatcgtttcattttcaaccaaactttcaatttcggcattaactaaacacactctcaactccacattttctttagaattagactgacctccacattttcttttcacggaaaatatacacgatgctaaaattatttgatttatagaagtatatcttttattttgttttttattagacttaatagtaaatgaaaaaggaaatatgtgtgcccaattgtcatacttataaaacccaataaactcaagaaaatgttgaccattcagtttttaacaattttgttaataaaaatttgaattttcatctattgtttctaccaaaattgtatttttaaaatatttgaattatgttacatctgtcaccaaatgtcttgttttagtttttttctcaaattcaagcctaacattttttttaaaaaaaaaaatctagcaccaagttttgaaagtaaaagaaaccatgttcaaatcgaacaaagctctacgccacgttcactatctaacaagttatctagtttaatattacatttcttgttaactcctcttacccgaattggtattatgatcatgactatgattctatagtacaacttttatggagctagggacctcaaccttaaaggaagttttttttttctttccaattcatttattggataattcaaattttagcttagagaacggtccatatggaatgagtagcatgtacacatttaatagtttaagatttaaaaatgtatttgagaaacctacccaagtatacgaaatattagacaatcatattagaaacatgtaaaatatttgtaggaaaccatcggcatccaacaatttcgacaagggagcttgggaatatgtagtgtcacagtaactaatatgatttatatttttcttggtgaatggcacaaataatggaaccatcgatggaacctgtatgttctgaccactttctttatgtaaccgtggagggaacaatacaaagttttacatggaacacaccatttaaccatttaagaatgttctaacgaaaaatgagaaaattaccacagctaaaaatcacatcccaaggagccctaagaagggttactctattatatgcgtcgttgtgtataagagcaagtatagtagaagtacgtctgccggcgataggagcgcctccttagctttactggtgacctaaaagagataataggagaaagagagagcaagtgagcaactaagagcagggaactataagcctactataaccttatgtggaggagagaggtagaagacagttggctttcatgcaagatctagctccaagacaaatatattaaatgtataagtgagagaaagagagatgagaagaaaaaaattgaagtaggaagtgagctctacgattatacatgttagctttaagataagctaatagtagaaagtgagctctacaattatccttagtctaaattaccgctacctcctcacacactccaataagcatgattaactttcacttgcatgcagcaaatagagcaggtggatgagtgaatgatacaactatcactactaaaagaaactcatctttaatcccagtttgcaacccctttagtcccgggttgcaaaccgagatgcccaattcggaactaaagatgctcatctttagtcccggttgaaataatccaggactaaagtttttttttctttttttcattattttttttctgcatgcatattgatttccaaccaaactcaacaacaaaatcacccacattcacaaaaacatcatagaatcatccacaatttcaacaacaaaatcatccacaaatttacatcacaaaatcatccacaaatacctagattaattagatcatcaattatcagcttcattctccatctctagaggatcaaatacctagatttattagatcatcaatcctgtagcctaccgccgccgcactgggcgccgctgccgcctgccggtcgaggaggaggagaagaaggagtggaggaggatgggaaggagtggagaggcgtgcgggcatgcgacgatgccgaggagataaggaagagagagagagagcgagagatgcgtgggagagagatatttagtcccgcttagtaataccaatcgggattaaagatataatctttagtccaatttgttcggaggcctgacagctattaaaccgagactttaaaatgatcttgttaccaatcgagactaaagatcaaagagagacgctgaacttttgaactgggactgaagaaagcttactacactattaaacttgctctaattaaagtataaaattttactgctcataagggaatcttttcctaccgatatgaagttttagtgcatatgtagtttcgtacgtactatataaatgtatcaactgtagtttcacagtatccctttttggttttggataaatttgcaattctaatactgacaacaattacttatgcagttgtagcctctaccgtttgagctgaattaaacggtacagactatccagagtgctgtagcaaaagtactatataaaagtttttttttttttgattctgctgtttgatcacgtagctgtgaatctgaattgttgatcatcaaaatatcaaaatgaagggctgaatatatatatacagtcctaagtgcagtcatagttatggctggaactaatctcaatcctcgaggaacgacaatacttatttttctttgaaatctgttagcacgttttttaaacatctaaacgatgtgtttcgtataaaaattttatctgtaaaattagctataaaataacatataaagttattttttaaaaatatgtaataactaaaaaataattaatcatacgttaattccctttctcttctttttacatgcccaatacccattaactctatctccatcttcaccatttcaaacacctctctgcggcgagaaaatggacatttagccacgtccaaaacagggtttcactaaaatgttatcccgaaaacgcgtttcgctaaaataccaatatgaagcgcgtgctcaccgccactttgccagtttggaccttttgtgcattttcgaaatcattttcactcctccaccggatgatgagacaaaattgcccttcatgtcctccgtcgccgtcgttgagaaagaggagctcgtcctcgccagccaatctccatgtccaccacgagcacctcaccgtcttcctcctagacggcgaggtggccggcgagtccttcgacatcatcccctccctcaacctcgccacctccgccgactacctcaccgcggtcgacgacgacggctagggtttcgaggaggccccatgacctcgccggtgacggaggcgaagggggacgcggtggagagacaacagcagttgctggcgggcctcgccggcgacggagggttcaccggtgacggaggcgaagggggacgtggtgaagaggcagcagcagctgctggcgagcctcgccggcgacgaagacggagagggacgcggtggagaggcagcagcagttcctggcgagatggagcgcaagccgccgccgccgtgaggcctcctcgacgacctcacctccgcctccgcctcgtcaatgtcgtccgacggcggcagacaggggcagccgccggtggttccgttgctccgcgcacccgcgcacccaaatgccctcgtcggcagcggcagtgggctcatccggcggcgttgctggccatcccgcccttgtcgacagcagcttcggaaggggaaggatgatggatggaagggcattttcgtctcattacctactgaagaagcgaaaatgatttcgaaaatacacaaaagggccaaaatgataaagtggtagtgagcacgtgcttcatattagcattttagctaaaccctttttcgagatggcattctagcgaaaccctgttttgaatatggctaaatgtctattttctactccgcggcagtgcggcacccacacacccgcaacagggaaaaaaaaaaagcgctctccaccgcgacaccgctggctcgccacttctccgtccgcccgcccgcgtcgcggaggtggcgcgcgcgtacgcgaccggaccacacgagcgcagcggcgccagaaaaaaaaaacccaaaaatgcgttcgattcttcgtagtacgtaccaacggccggcgaaagccgcgacaccaacacccacccatgtgtgcgcgcgcgcggtgccgcgtatcgccgtgtgccgcgcggcggcgcccatgtgcctcaacgtgggtcggttcccccctgcagtctgctcctcgatccctttctcctcgatcgatcgctcgtcggttattatccatcgagctttcggtggaagcgtgcgcgcgtccagcgcgatccggacacgcacgcacaatgctgtgctgcagcgcatgcaattgcaagtacatgtgcgcgcgcgtccgcgaccgcgagcgccgtcgtgcgtgcgtgttcccggcaagattcttccggaacatgctaaattattgacgctaccaacggcccgaaaagcaagttcatgttgttgtctaccgaaatcatcaatctaaaagccctctccaggctcacaactccagaggttcagatcgacatactgctgcaacgttgcatggttggttattagaaattgaaatcgacagaacagaagagtcgtagcagcaacagcagcagcagtccacgccaaaattttgttcgatcggttcgcgacgaacgagcaatcagacggcatttgagacttgagagggataaggatggacctcgcattatcagctgcatgcaatgcacggcgacggggtcctcttattaaatgttgtggcagggtgacatgcatcgtctccactctacagtgctgtcagtgcgtgcatgcatgcactggtggtggaccggtgcaccggccatgatctcttatccacaaaactgaaagtagcagcggtacagctcactagatatcccccccccccctaattttgacagttctccgtaataatttttgggactacctatacatttgtcgataaattttctcttaaaaatttatcaaatgtaaatacaatataattatactataattactctataactacaaaataattacactataacttacatgtaactacactgtaactatagtataattatattgtaactatagtatgactacactataattataataattacactgtaacttacatgtaattaaactgtaactataatataacttacatgtaagtgagattctacctttagaaaacttatgtttggcactgctcacgtgaaagagggattatgaactcgcaatgtatgtttgtacgatgcgtgcggaggccatcattcatgcatacatgttcggatatgccctgccgctttatctctgcccttcatctgtcatctacgagtgcatgagccgcgcctgtggccggcggccggcggccgtcacaagaaacaaatcaaagcgtcgacgcaaaagcacgaatcccgagattcatcaagcagttcaaaaatcgataaattctgaggaaggaatttgtcaacagatttatagcaaaatcgcaattttttcttgttagagtagtatactcagtctttttctttaaaggatatactcagtagtatttctaatgtacattcgtgctttgcgacgaaccaagctcatatgtaatcaaaatttgggtggaaagttatgctttttcgatagatcagaccaattagagattgattgggggatgaataattaaggataaatcagaatggttatgtacgtatacatgagaagaagcgaacattatggcggggaacggaaggagaacgaaggtagcaatagataacattgttaagtttcgaacatgcatttaattgcttcttataaaaaaatatactaatcattatttcttttattgcgatatattttatcactaaaagtaatgtatgttatatttgtacaaaattttttaataagaaggtggaaaacatgttaataatcacaacgctataactttaaaagcataagcacttcattcttccatagggacgactatgtttttcaattctactagttaattaggattcacgctattttttttcattttaacaaaccacaattaattatttcttttttattcaaaacaaagtacaatgtagacacttataaatcacatgtacacttatccttataaaacgagcacatgagcacatgtacaccctattctaagagcaactccgagcgtctgattaacatattttgatgctgaagtcatcataattagctcgttcgttgtcgacataactatatcgcttaccattaaaagtataattaatcgtaaatacgagtacacatgccaagtttttaacttaatttggtgaacggattccaccgtgaataacctaaccagctaaacttatgctcaatttgtcataataactactccctccgttttaaaatgtttgacaacattgactttttagtacgtgtttgaccattcgtcttattcaaaaaatttaaataattatttattcttttcatgtcatttgattcattgttaaatatactttcatgtatacatatatttttatatatttcacaatcttttttaataagacgaacggtcaaacatgtgctaaaagtcaagggtgtcaaatattttgaaacggagggagtaattattttcgtaataagtttttactagagttcgattaatatatccaactccaaaagtcgttgaattcacccacacctgcaaggctacaactgagatgcgcaagtgtatgaccacaaggtgagaaatacataagcacttttaacctgcggtccctccaacccaagatgtcgctgggcagccggtctcgtctttatatataccaccactcgcttcccttctctcctcacattacccccggccgcaccacccccttcttctccaacctcttgcagctgcagacacaatcgttaaatcgcgatcaccgcagcaagccatgtcgtcgcagcggcccggccgtcaccagcggagggcgtcgcagagcgtgttcgtgctcccggataacttcgccgacctcgacgacgtgccggccggcgccggcggcgccggcgaggacggccggaagggcgccgccgcgacggcggacgcggccggcgggcagcagcaggctcgcccatcgccggcggcgcgccaccggagggcgatgtcggtggccgtggcgtcgtccagggagctggagatgatcaaggaggacatgggcagctacaagatcggcgcctgatgcagcatcgatcgcacacacaggggcgccgtgcttagtacttgcggctaaatcgtcatgtgtatggccggttaattt

SEQ ID NO: 50447 - DNA, 739 bp, Oryza sativa
gggcgggggaacgcgacgcgaaccgattggcgcagcgcagccgtggtgctctgccgctttgagagcggcgtccgagaatgctaatgggcgggtgatcgctctcccgtccgctcagcgatcgcccgcccgcctcctcccctatacgatacactactccctcctctccctccttcctccttccattcttctcttcctattacattacaccacacaaattttttttaaaaaacaaaaagttagaaaaatttatgtatagaaatactatatatatacaatttgaattcaaattcaaatttgaatcgggtgtgtaaacttttgacttataaactttgggtctgtataaactttaggtgtataaacttttagatgtatagaaatactatatatggaaaatatttgaattattcaaatttgaatcgggtatgtaaacatttgacttataaactttgggtctataaattttaggtgtaaaactttagatgtatagaaataccatatatagaaaatatttgaattcaaattcaaatttgaatcggatataattcaaattcaaatttaaaacgggtatgtaaacttttgacttacaaactttaggtctataaacttgaggtctataaactttagatgtatagaaatactatatatatatatatatatatatatatataaatatttgaattcaaattcaaatttgaatcggatatataaacttttgacttataaacttttggtctctaaa

SEQ ID NO: 50448 - DNA, 655 bp, Oryza sativa
gtctgagctgtgtagtaatggtagctgaatgaaaagtctgagctgctgtgcaattctgctgctctctagtgtgactgtgaggacatgtttagagctatattttttcaaaagcaaactatagagataatccagatggccgtttttatctccaaggtttcggatgaacaaaaagaaacagccaggaatttcaaactacactggcaaaagcacagatgaatcacaaaaatcgccaattttgagctattcaagaccaaaatacaaatccctatatacaattagcagaacacaaatatgtgcatcgtctgcatttgcaaactctgaggaatatgaagtctatgaagtattagtgagtataggccttaaaaacataaaagtataacataatcttttttttttgcgaggaaaagtataacataatctccgccgtagaatcagtgtatacatcgattccttgtcctccaattgcaggcaactattcttgaatcttcaacaaaagctagcaagtataaaaggaccaaaataaaatctgattctatccgattcacctcttcttgtcacaactacttatcatccatgccctccttttattttcagtagtataaaccattcaaacatacacttcactgattagaacttaaaacaaattaattcatca

SEQ ID NO: 50449 - DNA, 1415 bp, Oryza sativa
tttaaaagagggggatagcatatggggcccacaattaataagtgagtgtggttgatcaaatttggcaagtgatcagtggagggatttggtcaaccggatggtttgaccattcagtgggagaggttgttgaagcacgatttttaactgaaattatcaaaatttagcttgagaagactgatggagtgattgttggagaacggagatgctccaacccatcaggaaaaaagcagcaagaggtcgtgttcggagctcatcggcccagcagatggcaccaatcaggcccaaacctcttgggtcacctaaaaggtgtcaccatgggcttgcaggtgtcaagtgtggagccgcaacgacccgtacgcagatcggttacaaccccaatcctccactgtctctggactctctctgcgtccgcttctccaaccgccctcgcggtcgcggcgcctcccccgtccgcaagcctctgtgccgctatacgcgcagcgtgcgtcgtcaagtctccctctggcgtcgcgcatggcgcggacagggtgcagtgacatcaagaccttttcgtacgccgattcccaaactcaacggtgttccctccttcctacggtcttacccgggcgtttcgctgtatcatctgttgtacgtgaaaaggcgtggtcaggcctggacgctggggaggctttcgaacagaggaagagttcccgcctctccgacgggatgatggagccctgatcgacgggccggctgcgaggtgcaccggctgttgttgttagcttggatctgggttgggatgtctgtcttttctggagcagccagtttctcctgcccatcacatttgccttattttactagccgattgttggcaagattgaggtggaggggggacattcttgggaagattgagatacttgtcacagtattggactcgtgtgtggcatatgccccccaatgcacatggatcactcctcgggttggcaactttaactataagtactagtactgcactactgcttggttgttccagaaaccgaagcttgtttctgcacaccttatttttgtcaagtcaacgacgattttccatagagcttctcttggatgagactagtacttgtgcttgcttgcttttggtgcaaaactgcaatctctaatcttcctctaatgatgttaaactgagaggcagcagcagcagtactaagagcaggtgcaataggaggcgctacaccggcgctaaaacaaccacgtaaactacaacgatgagctggcggagaaaaggtatgagagagaatatgagtggacgactaaatagtcgctcagctacacacgcgtttcaagatggtgaaaggctcacggacaaatcagaggaaacaagaagagagagaaccagataaatgaggaataaaatattgtttgacattaggggggatcca

SEQ ID NO: 50450 - DNA, 1558 bp, Oryza sativa
gtggtgtgcaataaacaataaattttaacaccgcggttggaccggtgaaccgaggcctcaccagttcgacgtccggtccgagtttttatactatggtgcagatgggtcaatatattcatgtgggctacatttgacactgagaaggcgaagagactcactcggtgactaatgggttgggctctatgttgtattccatccaacgtctgaaaagcgatctaatgcattcatccaatggttaacaatttgatgatgacgggacttgattaacatcaatttgttagatagtaggtacaatcatcaatttgttagataggagctacaacctcaagaagaaacaaatatgtttcttggagaaattctttttagctgccctatccaaaatttgtagataatttaggtagcaaattctttttagcagccctatccagaatttgtagataatttaggtagcacatatcaactgaaggtcctatccaaaatttgtagataatttatatagcacatatcaactgaaggggcgttcagccataaagcactggatacatgtagatgtgtgtggagatcacagtagaaaaaatcggaccggaccggcggttcaactcaactgaaggggcgttcagccataaagcgctggatacatgtagatgtgtgtggagatcacagggaccggaccggcggttcaactcaactaaaggggcgttcagccataaagcgttggatacatgtagatgtgtgtggagatcacagtagaaaaaaccagaccggaccggcggttcaaccggaaaaaacctaaactagggacctcgccggttcggtgtgtttcaaggactgttcatgcagttgacccagtgtgaaccgactgaaccggacggttttcaggaaaaaccactgaagcggggactcctaaaaccggctggcccagttttcaggaaaaaccactaaagcggggactcctaaaaccgaccggctcatacgagctgggccaccgtacagcatcttccttaatgggaagcccaagtcctaaggcccagttttattttattgttcaaaaatcgggtgaagcatgggaatcgaacccaggtttgctagatggagcgttaagttccccaccactacaccacactgaccattgtggtgtgcaataaacaataaattttaacaccgcggttgaaccggtgaaccgaggcctcaccaattcgacgtccggtccgagtttttatactatggtgcagatgggtcaatatattcatgtgggctacatttgacactgagaaggcgaagagactgactcggtgactaatgggttgggctctatgctgtattccatccaacgtctgaaaagcgatctaatgcattcatccaacggttaacaatttgatgatgatgtggaagcacgaggtttgagcttttggccttaactttatagaaagaatggataacacatcttagtgtcgatttcaccgcgtacacgcataaagaagatatctgctatatatatacacacacatacacacacagacacaagtaaaatatactgttatagtaaaggggggatcca

SEQ ID NO: 50451 - DNA, 612 bp, Oryza sativa
tgaaagaaaagacattacgatgtttagggaggttaataggcactacattgacctgatatgtttagggaggttaataggcactacattgacctgatagcttactcctacgttttgttcagagaggtaaacaagcgatttcaaaagcacttgtcgaactgttaccatcaacctcttgtgctgctgctgttgtttgctgctcctgctgctgactcgcgttcagaggaggacggacagcttgtccggttacttacctccggtgcaccccctcatatcagcatcaggccagttgtgcagagcgagagctttaaaagaataagcacaagtgttggtcagtacataaccccctggcttaagaaaagtcagcagcaataggaaggcaactttaacccctacggaccccagctttggtgtcctgcaggctgcagcagccagcagggcagcgaggagaggttgatccgttgatgcaaatgcagtactagtagtacacatgcaaacaaggtgcaaaagcattggcagggaaaggtacatggcagcataaacaaatacagtacgggctacacgagagacttgccatcgcttgcgtcgatcgcttaagaaaagggagctgtcagt

SEQ ID NO: 50452 - DNA, 1157 bp, Oryza sativa
gaaaacgatttagaagcaggtactgcagtagaatccaacgctgaaatggcaggctattcaaagagcgtaacatacaggaaaaaggtactgaaatcttaccatctgttgctgaagcttctgattttcttctactggatattctctctctgcaaccagcattgattctacagagacaccctgaacagccacacgcaaatgcaatatgagcaaggcagagcaaactgatagattaaagcgtcagtttactgcaaaaaaattctgagtataacccgctaaatagtattgtctcaaccaaccaaacaagacaatacactgaattataacatacaggttctttgttttaggtatcatactgctgtactgacaatggcatggtaccaaacaaggtcacttatctacccagacaaaacaaactgaagaaagaagttgactactaaacttttgataatgacatcaagagtctcattctgcaggagaagcatcacaaggttgttaggtaaaacacgttagagataactttgacatgaaaatttttagtattacattagctaacatgtgattgtgatgaacctgaaatttttgttttcttttaaaatcggacatcggctcgtgtgcaatgtgcatttttactatagaaaaagcatcagagtacactcaatattttttaaaaaatgtaaaacccggatgccattatgacaatgcaaccaacaagactatgcatcactcatcttagtgactaaaaaaactttaaccgagcaaatggttacctcagcagatgaaactttgtctgctgacctatcggtgagtgtggatacctgagaaggaaacatgtatgatattgttttctctgtagcaccgaataaacatcaatgcatgatattacttacagttacagcatcaaacactgatgtcattttcactccatggctcatgacctctgactgaggggatgcatcctcttcctcttcctcttcctcctcaggcactggagagggaggattagcagcaacatacaccacccgcagcttgaactcctcgatcaccctgcctggcgctttagttaactagaaaccacaacaccatcagctctaaattttggttagcccccggctagagatatcagatatccatgaagattgctacaagaacttaccaat

SEQ ID NO: 50453 - DNA, 1027 bp, Oryza sativa
ggaataggatattggcctgaactttatggtgggatcgttgcggcaaatatcatatttaagggataggattagaatgctcgtcatggtaattgcaaaaacctccaatccaatcgcattcgttggatgcgacatcaacgttgccgatgtgagtcctctggattttctttttggtgtcagctttgggtatgcccttttttatatactagtatattactactactactaatctaggatttttttccccctggaatgtgtagcctatttcagttaactaactgcctaatgcagaaatttatagaactcataatgggcacactagtttgttgcaaaattggctaaaatttccatctgcaaagtgcatttgcagttctctactctgaatcaacatcacctgtcaaacaacctccacaaaggataatgtatcatgtagctagaactgggtaatccaagatttggtagagtgtggtagggtaagcctaactaaaggcctcctcaactgcctgcctctgcagctgaaacctgaaacattcagctaattgatattcctgagttttgtttccttcttatcttaaaagtgcacattcggtagtggttgggcaatcaattattgttgagatatcagcttccaagactatacgagtgcgaaattgtttgggcttgtttagatatcgactggatttaccataaacgggggatccacaacgttcaaatgccccatgtataattcagttgttctttctctaattcagtttatccatcataattcacggccggcttgacaggccaacaccacgttgaggcccattagttgtccatgccccacatggccttcaactgctgcgaaccttcataaaagggcccataatagctctattggaaaaagtccactttgactcccttaattgttcaccgaatctaattcgtgacccttaactagaaaaccgggcagaatgactcccccaattactaaaaccaatacaaattgaatccctcagcggttttgaagagtggtttcgctgacgtggca

SEQ ID NO: 50454 - DNA, 752 bp, Oryza sativa
gaaccataaaacattctgcatttatgcagtcgtgcataaataagcagagacgcgaaagggcacatagtcaagtaagtaattgtagtgacttgagtagcactacaaggttcttaattcaaatattcatagaagcaaatttcagattgaattatttaggggactaacttcctaatttaaaaacgttgcatatatccgatttgatgtaaagactgaataaaaaatatccttctctaaaaataaatgtaaagaataaataaatgagcagagacgagaaaatttcccgatcaccttcgcaacaggccgtgaagaagacaatcttaattggcaaaccgagacgagactacagcctggtctaggaataagttcattttgactcttttaactagtgaccgaatttgatgcgtatcctgaaccacagtaccggatatctcgacccccaactatttaaaccggtgcaatttaaatttcttggtggttttggagggcggtttcgctgacatgacgcatacgcgacggtgttgacctgatctttatcctacatggcattgacatgacgtttatgtggcactagaattaacaaatatacgtgggactcattgtcatttacacaaaaaaaaatatttgtggaccccacatgtcatcatctctccgctttcccttccccttcttcctcctccctctctctctcccttatctatttctctttctctcccctttttccaacttcggccggccgcggggagtggggctgg

SEQ ID NO: 50455 - DNA, 1135 bp, Oryza sativa
ctactgtactatgaacagcttttaagaaaccatcgggcttaacccatgcaactttctgcccttgtatatattcccaacggcaacccctccgtgtggcccttctctctgtttccctccttgcacgcttgctgctcgatccttggctcattacactgccatcaagatcacctcatgtctcccttcatatccatttcttcttgctgatcattatcactactcgtgtgcctagctagtgccttgccatgtcttgcttgacctctcctcagctggctcccaagatgcagcttaagctcactgccgctgtcgccgctctcctcgtcgtcgtcttctttgcgctcttcgtcggctcatgcgaggcgcgccgccttcgtgcccttggcagggtcagctcgctaaaaccatcgtcgtcacctcctacgccgtacaaggttggtgcagttgaaggaataacttggtatatatcggaatataaagtgttccttttttttggctgttctaatttttccatgcttctcccttgtgcaggatgcggcaagcatgaagcttcatggttctgatccaacgaaccagaagaaggatttatcaagtactagtatggatcatcacatggctagcggggacgatgcgaaggcgaaggacggagtggcaatggcatcaccaggtgcagttcagactacgattgtcgttagggtttcgaaccggctctctcatcaggagcgaagggtggacacagcgtttcatctggactacgctggccctagaacccatcccccctctcacaactgatgagtatgtcgttctgtggcattctctgactctgtctgatgatcttaattactaatatgcaacttaagtgatttatgtatatgagtgttcaatctctaattctggtgcatattcttgcttgtttgctcttatatatgctcaatttgctaataaattaatattatcggtataaatagatcgtagaatgtgtagttttgtagaaagctcgccggctagatattttgcttgcttgaaatatgaattgaagttcacacacatgtttatacatgtaagtttgatagccgtgtgagaactatatgttgacatctatatgttgactatatacaaaacttgatagaaacatgaatcg

SEQ ID NO: 50456 - DNA, 549 bp, Oryza sativa
ggatcccccaatgttttttacttactgcaatgttcctcgtacaactttcaatggtcgcaccatcgacgatggaagctcaacaataattctctcatcagcatcactaggcacatatccaggtgcaataaccgtcgaccgaaccaaattgcgatcagcagaaatgccagaacctcgtgaatctattgatcctttcacagactgttgatctgcttgttggagtcgatcgtcaacactgctttgagttgtgtctgattctaactgctcattgtcctcatttctgtcatccactgacatggcctcagccgttattataggtgcagttgatggaagtgtgtctgttactaaaggttctgtaccctctgggttgcattcatttgattgtgcaacattacttagctttcgctcttcataatcagcagctgcacccaaatgatcagaccccttgtggttccttttcataaatcttctcatccttgaagaactttcagtaaaatctaatttccagaaaatctgaaatacaggaaagaaaagaaacatcaaaagatgtcc

SEQ ID NO: 50457 - DNA, 786 bp, Oryza sativa
taaccccgagttgaggaaacggtactcgacgagcaccacctaagcgaagtctcatagtattgttattctcttgttccgagctagtgccataatgcctcccagtattagcacaatccaatcgaccataaacaccataacctataaccttgtttagacgtgataccctacaataatcgcgctgcgagcaaaccaatatataggcacacactcacaaatccatagtgtccatctagagaacgagtaagatgtggacataagcgatattgtcaatcaaaaccaagatagcaccaatctataggttggtgtggaagaccttgaatatcgatgaaaacattatttagaagtacacgttaggtggcagcagtcaaggtcggatgtaggcgtgatgccccaagccaggccccgttgccgatgtcgtcaactagcacgctgccagtggcacaacagcggttggtgatgtcatgctgcttgtatctagctagatttggacgctcctatatcaacttcttggcacacaagacgcccgatgatatctctgtaccctatcgctgttgcacctcggatgacgacacaacataagacggggagaagatcatctaccatgtgtgtgccaaagtgccagatcaatgctggagacgtccgatccatggttggctccctaggcagtcgagggggaggggaagtaggatgaaacatataatagagtcctactgccatcggccatcgccattgtgtttgtcagaaaccaatgaggatgaagagcatggtgtagcggcttggatatct

SEQ ID NO: 50458 - DNA, 697 bp, Oryza sativa
attcctgcagccctcgttttagcagcccaaatatcacaatttatcgaatatctcacaaccaggacgcacaatctctctcaacaaacttcaatgactctaggctacaaagtcaacatgaatgcatatgcaaactcaatgaccgtaacaaggtacgtaacagttacaggatatcattccgaacaagcagcatcttcgtcgaatagtacggggagaaacagtaatagtaaccaggacatggcaaggacactgccaatccgcaagccagaaaattcagagaaaaatacagcaaaacaaggccaaaaaaagagagagtaacaacaagcttaagagaaggcaacaaacgacaatcgaagaatttgatacggacagggaagaagagattctagccatttatagtggcaccgatcacatagtcatcaattggcataaaacggcaagcgcggtgctcaaataaccaaacaacttcataagaatcagcaaaggcaaggtgaccaaaaaattgcattgagctacgggaagagctttgcactaagaaacccacaaattcgcatcaaacaacaaaacaggcacgaagtcaaccctccagcgcgtgaaaaaaaaaagaggagagagagctgaatcagacctcgattcaaatatactccaaaggctcaaatcgaacatctacgagggagacagattttgatcattacccagc

SEQ ID NO: 50459 - DNA, 532 bp, Oryza sativa
cctgcagccctatttttcgtcacccctatgtgacttagtagcatttcaggcggatacacgatctctggaggcgagctctttcccccagccgaactcacaaaaaggggatctcacgatttcccgctagagaggatcactcctcgacagggacggagggagtatatggaattatatcaacagtagatatatatgaaccagtaatatcaaccggtgttagaagaagaatgttgtattgcatagtgcatacatgatcccgctgaccatcttagatacttcctccatttcacaatgtaagtcattctaacattttccacattcatattgatgttaataaatctagatagatatatatgtttagattcattaacattaatataacagaaaacctacaccacggcatcccgtggagacgggatcccctcctcctacctcactcctcttcccccaattcatccggatcccctcctcctacctcactctccttccccaaatcacacgacactgcagccctctcccgtcaccttctcctacc

SEQ ID NO: 50460 - DNA, 521 bp, Oryza sativa
tggtgagatgctgatataaaacaagtcaagacacttatccggttgctccttgtcaagtgctggagttttcttttccgacctacgggacgacgggaagcatgctgagctgctgctgatcagcgatcaattcagcatcgtcactatggtcgatcgaattatttgtttccgcgactccgaggacaggtcggaaccgaacctcccgatgagacgagaagaaaacggctccacgactgcaccacacatgccagtagccacgcgtccacgccagtgcacagtcccggagtacttgcctgctccgctccgtttcgtcggacgaacgtcggtctgtcacgctcgaaccggcgcgcgagtgcatcccctcgcgggcgcggtgaaaactgagcgcgaccggccctagagattcgtcactccgccaagcgatccagatacgcgcgctgccacgccgtaagcgtaacgtcgctgtacggcgttctcattcaagagttgcccgtccgcgcgcgcgcgtggtatctctatcccct

SEQ ID NO: 50461 - DNA, 808 bp, Oryza sativa
aatatgaagccctaacgtggcagttcctcgtatttctcgattttcggggatagaaatagagttagttttggataatagtaacacacaacgtaaatatttagacatcctaattcaactaagcggaattgctagggctatggctatggcgaacctgcacgtcctggactccctcgacggatcgaggtgcatcatatacaccgacacccttttggaagcttgcaatcataatgctctgtgtctttcaccaagatagattatgttcgtctcatgtgccgtacgtgcagccacgcctcgccggatcacctgactttcacgcatcacttattcaaccaccatcgcagaccggggagaatcgatcggaggttgaaggtccgttctctctcttctttgctcattgatccagtgattcctaggtgtgtctgcttgactgcttctaggtccttgcttgttagtgatcgcctgacgttaattggcttacctacaccataaaaaacagtatacaacttaggctaattgggtcatatgtttagctttatcacttgtcgcactcaacagcgaatttgcatattaagaaaataatgggcagaacatgagccacaagattgtagtctttgccatggccctacagttgtggggctcaaaagaagatccggtagagagcataatattagagcacagggaatatccttgttcagaagaatatcctatatctatatctccccattctctgtccctggcatttgaactggccattagcaaaatccacctaaccggcaaaggtaggtgtatgcttcactcccggtatggg

SEQ ID NO: 50462 - DNA, 1855 bp, Oryza sativa
ataccttatctgggttttatttttattgcccccgcgagcttgaattgtggacctcgaacgtgtcgattggcccagctagctttgacggttactagttcgtttcctctcagttgcaagtggagcagtacgagtacctctgtttagattttactcctacataaggtgtagatggatcataacaggagctgaaacgaactttcggtttcggattggaggcaaactttctcgttggtaatctcccctatacactgtagttgttctcgcgtccgacgccatgaatcgccgtcaatgcatactccgtaagtccgtatggtgtagagaggtatgtccactacacactaccgggctgtatttggacacggcccgcgtcttccagtcccaaccgccgagcctacgtaattgccggcccaactgacatgctgcgctcaacttccacattttcccggcccttctttgggccaactcgcaaaccgcccctgcgcggcatggaacgcagcgaatgctcacgcagtcacgccgtcatgcgtcggcgttggagtaacagcgacgccaagcgggcacgcaccgccggctagccgctaaaccaggttttgaaaataattattgatgagtttattttaaaagttaaaaatgcttaaaaattattttaaaaatccacattctgctcctgcctttgctcgacgatggttttgagcaaacagttttttgttagatttctctctgtctcaaaaagaatcaaactctaaagataaatttagatttgtttttttttgaaatagagagaactaaagaacggtattactatatctttgaaatggtatagccatgatatctactccatataatatcattctctagattctctattaatagtatttctagacgatatgattagtctcttcctttatctttggtttttctctcttccctaagtctcttcctttatcctttgtttttctctcttttctgctataaatcggtctgactgatttgcattgtgtaaataaatactcttttcttctaatacactattcacgtattattattttacgtgttcgttaaaaaaatagtaggtgcaagtgtaacctgatgataatgtagctgtagccctgcgtctgcatgcgagcctgctaaggattgtggtgatagtgtggtgacacggccacaaggacgtttcttcattgcttgcacatgaatctggcctatcttctgtctcaatagccactttgctagggaaaatcagtcaaggtcgcaaaggacgctggtaaactttttttcctttcaatgccctgtcgtgttgacacttgacacaatgaaaaccctccaggacgagttgccacgggggtaggcgagagctgcagcacaaggaccgtgcgcaaatgtatgcatatgagatgtgatatgatatgacctgaccaaactcctggtcctgctttactgggacaacatctacagcaccgtaataagttctcattgctccaacgcagacagtactgggatatcagattggaccaaagaacagtaggcacaaggtcttccacaaattcaaccgctgtcacggtgtcacctaccacaacttgcaatattcagaccaaatcaccaaagtttttttttcctactttacacagggacgaggatgatttttttttttcaaattgtttgatgatctgacgttgcttggctgttttttcaggttttatctctccggggaatctccttatcatccttgtcatcaaataatgtgggaggttgaaattagttcgaatgttacatttcattccaatgccaatctgcctaacagccccaaagctgatgcatctgcccactgggttcggagcaatggagcgggggatcc

SEQ ID NO: 50463 - DNA, 502 bp, Oryza sativa
cgaattcctgcagccctggtttctatataagccaaagataaagaagacagtcgttgctcgttagcctggtgtaagagcatctccaacaacatctctatcttcctctccaagttaaaaattgacatttttggacaaaaacacactccaacagactctctatctccctctccaagccatccggctggccaaaccactcctcccgctggccaactttggccagccaaaattgacttgccaatcatgggccccacgccttttcccctctccctctcccctcccatattctctctccacgccctcaccctcctcccagattgctcgcgccggcgccgcccctctgtcgtcgttgccccttgttcgcggcgccgtcgaccgctgccgtccgctcgcatccttcgcccgtgctcgccgctgccactcgctcgcatcctcagccatggctgactggtgcagcgagcagagcggaggaggtagtgcaacggtgagggagggagggtgcggc

SEQ ID NO: 50464 - DNA, 1146 bp, Oryza sativa
ccaaaatctcttatattatgggacgaagggagtatatggatgataatagagcattgaagtttttacagtttaaaaaataaatttcatctaaatagaaatataattatctatccaatgtaattgtagatctagatcatagatttgctgtaagaaatcttgaatatggaaccgtatcaaaaatgatctaactataacctatgctcaatgtactgggatagccatatgggtgttcactggtagtagaggatggaattgaattgccatattgttagtgctatactggtggttaatcatatggtcttgttcgattaatctccggttaatcctttcaaagattaaaggggattaatctcacacctattgaggtgtgaaattaaatcctcctcaatttcctttggactcttcctcacatgggttaatcaaacaaaacataatgggtttaattgttcaaagagattttctaactctgccattgtacgtatccttacagtgccttttcaaggagtcaaacatatgtgctctatggtaaatatgcatcgctttgaaacgtagtactacaatagttcatacgtttaggcgacacatgaaaagcatgagaatttaaaggtagtaggagaaatttgtagcgcatgacctatcctctatatagttccctgcagttttccacccatagccaaaattcaggtgaccaaactcaactacctataaacccggtggaaaaggaaatgagcaactatctgtctcttcaacatgtcaaagcaagacttgttaagcccatgtcctgtcaacgtattatccaggacttatcaaactaaattttttttccctaaggagctgcaagattctaagggaggacaaagtagcccacctgaataaatcgatttcttcagagataattaagaggccaacacaaattacaagtggcgagaatagattacaactcacatactagataaccacttgagttattacacattgttagccgataagaaaatgaacgtcaggttgccaatctaacaggcgtggagctgggaaatttcgccctgtggtgttcaatgtcaccgctttatattttagcaggatcatttatgcacatttcaatagatttacatgtaaaaactgagactaggaaaagtgcttgtgaaa

SEQ ID NO: 50465 - DNA, 1180 bp, Oryza sativa
ggtgaacccaccattcagagcaggtacaatagcagactattagccagctataaacatattttaatgagataaaatatgagagagaagagcagcgggttacaaatttgtatggactccaagacacagtgtgtgtatgacaggtcggaccatatattaatagtatagtaagcaactattgtataaattcgttattagatcggctatagataaattagagctaatagtggacggctgcaactacaagggcaacgaagccatcacacacgttacctacttacctcttctggttaagagtaggtataatagcagactataagccagctatatttaaggagataaaataagagagagagagagaagcaacgggctacagatctgtagccagctacaacacgaactgcaagatgcatgtatatatgacaggagagaccagatattaattgtgtagtatatgtttatgggtaactattgtatgaattggctataaaattaactatagatgatttggagcgatagttagctatactattaagagcaggtaccatagcaagctaaaagctagctataaacatattttaaagatataaagaaagaaagagaagagcagcgggctacagatttgtagtcagttgcagcacggatttcaagacgtaatgtgtatatgacatatgtgactatgtattagtagtatagtacacaactattgtataaattagctattacattgattatagatgatttcgagttgatagttagctgtactattaaacttgctctaagcacgtgggccggagtggcctactgacctactcgtccacccggctctcggtacaccgcaggggcgcgcgcgcccgggctaatacaccgcggggaggtcttgtcggctgcggtggatttcgtaggtgcaccacgaatccgcgcgcgaccatccttggctcgctagccgggtggtggaccacgtatatagttctcgatccatcagagaaacaagttcggtaccgtattgattatttatgccgtgaccgacccgcaaagtataggaggatccaaagaaattcgccgtccaatatcgcaaggatatccggctacaaaacgcacatcagcttatacgtacatcccttaatttgtaaggtatgcctgtacatgcacgtcggcccaacgcaaaaaacttgggggatcc

SEQ ID NO: 50466 - DNA, 680 bp, Oryza sativa
ggatcccccgcgaaagaatggatgtgggattcttgtttcgcaggtgcccaagaagtctgaagcctttttcatgctgagaggcccatcagaagtagtgatccttcctgtcatgcttaacttttttgctgcccttctgattatgcctagttaattcaaaattgctttggtcatttcacttaacaattgccatgtaggtgatggaatttctcagttccttggtgagatggaaggaacaatcaacatttgaagattgacagcttagccaatcagttttagttgggatagctagctgacgctagcgtttaagcattccctgggcgacaattttacagtgcccggacgtggagctggatagtagctagatagtttagctcccatagttgcaaagaaccagtcgatgctattccgtttcttctaatatttatcatcagaggcagagttctagtagttttttttttatgaagtgaacaatctttcagttctaccagtgaaaattcacaagcattacggcactgtgctaatcctgatattttctccattagtctccatcttggttaggtaccaggatttgcaataatgtcaactcgcatcccctttctcccctgaaaatgacagggaaaaaaagaagttcactggacccgccgtagacggcgacgtgattctctatatctctaagacta

SEQ ID NO: 50467 - DNA, 774 bp, Oryza sativa
gagtgttttgttcccattatgtatgggtgtcgaaatgtaaactttgctttatatacagtggaaaatgtaccttaaaaacttctccgaaacctccttctcccagcttattttctgccgagaagttccttgttgcagctctcaacactgttaagttaagggtcggtgggtcaacatagtcattgtcctcctcattgccggtgttgtctgacaaaaaaaaaatgtaacgcatgagtgcgaggggacgtagctagctgaggccaaagactgatatttattgcacttccacaatctaattgatttgaaatttctagggagatgcaaaaagttttatttcaattgagagtttcagagcatttttttttaaaaaaaattgaaatcgaaaggcttttcatagaaagtttcattttattagttgaaagtttcatcttctgtgttaaaagtttatctcggtgtcttagctatttcaatcatttgggttacgaaacgaagaaagggaattgggggcacgcaagattacattgtgaatcatttgcaatcacatattttgtcgcatcagaacttaatattgagcctccgatgtattactttatatgagttgtcttggcaataaatcgtacattgcaccgtgctatctggacactttcgtatactgaaattcagaagttacatgcacgctgtgtaatgggtatatttttattcctctggaaggatttcattttataaatccactcttacaataaagttgtagcacactaatttctaaaacttaacatg

SEQ ID NO: 50468 - DNA, 565 bp, Oryza sativa
ttttctttcttctttctgcctttgccttctttttcctcaaccgttgattctttcatggaaatcacggcttgtgcggcgaggaaaacatggccggcgggtctcagtcgtggtcgacgacggggtcgtgcggcagcgaggccttgcagcggcagctcggctcggcaggacgtcgtggcgtgcggcggcggtgggacgtcccggcgtgcggcggcgagttcagcgcgcggcagccaggtcagcagcaggcggcgtggctagggatggcaattttccccgcggggccgggtcccctgcggggacccgcccctacgggggcgggggcgggggcgatttcagacccgcgagtgagtcggggtcggggccccgcatttgggcggggaggggacgggggagacgtttcacccgcgggtgacccgcggagccccgaggatgtatattagacttaatcatagtatgttgtaagcccaaaaggcccatctggcctatcatatatatacatccaaaccctaatttccccacccctccactgctccacaccctatccccaatctctcacccaggcagc

SEQ ID NO: 50469 - DNA, 3744 bp, Oryza sativa
taatactaatttactgtgcattccaaaagaatcgtagcgaatatatcttgtaaacttacagtgacattcaagcgcaatgttttgttcacggatgaataacatcaattatttttgtcactcgtgctcctcatcttccattcccgcttacggtgttttcatagatagctcggacactcatcgtcaaagtcaggaacgaaccttctagtgcctagtatccatgttcatgggcagaaacaatgaattagcatgtattatttttctctttcttccccatgactctagattcttcttttaatttaagattttcttagatttcttttacctcagaaaatcatggatttgtctgcaagctcattgaagccacgtggcccaataaaattctggccaaacggccagctttagataagtagatattgatacatattacgcaaccctcctactatacgaagtagtccaagagggtcccgtaattcgacaaaagtggagacacaagatttaggggtgagactctcttctcattcatcattctatcctcctcaagcacaagtgtacaatatgagcacccctctcctccttatataaccttcctccacatatggaaggtttcagtgtgggcctaattagtgtatatgggctgggccttcatgggcccaagcccataggtttcctaacactcccccttgggcactcaccgcgtgatgtctatgcttcatcaaaactccacaaaaacccagtggaaaaaaattggagaaagagtacatagcatacgcgtgcaatgtcgcacggattgcctcattaaaaaccttgataagaaactactaggaaaacttatccaagggaaaaagagtacaattcacctaattcttcgttcaatctttctagattgattttgggtacttgattttctatatcaagattctgaaatgagttagcgaaattctccccctgaattttgcatttctctaagtttcattattccgatttctcgggcacacctattcaagggaagatgtaaataatgagttagtggatgaatctgcaagacttccacatgacttagttcgttgcttctatgcaattcatgtacatagaagagcttgggggttcatatgcttagtgagtttgcttctcacataactcaattgcatatgtgcgacatatgctgctttaatttcataaatggtgggggttgagatagttttcaaatcgcgattgctgtcgcgggtaaccatctctcaaaactatgccgaggctctgaacagttaacgatgcttagtttggtttagttcatttagccaagttttcatgtgctgctatgacactcgtgtttaggaattccgtcccattttggcgataatagactattgcaaaagctatgcaccatgaacattcctaagtgcagttggactgatgtactagacttccatctgtcgcatgcctttagctgcaagtgtaagcatgatttggattcggccaaatatttcaaatcaaactcaaattcaaaacgaacgagtttgttttcttcaattcttttctggtttattctattcttttatgttggttcgggacctagtatttattcatgtactattatgcaagtgtccgatccaaactcctgaaatgcgttcattgattctatcttcaatgcttatcaattattcaggttgaattcttcatttcaacttctagttcattaattccattcaactcctggttgactgccaatgagttttgttgtctaaaagagacattgcccatgataggtctcattgccaatttctactggttgtatgagactttatgcgagtatccatggatatacgaggagatgcacttttcatatgcttcttcttctttttcttgcttaatacttcttgatgtgggcatgtaccagcggtagtgtgcactccaacagctagttttcttccttgatgggaaggtgcagtacgcctattcggaggttccgtaccgtttgccagatctcaaccggctccccttctattcggtggggtaccttttgtgactttgagtatgatagtccctcttgccctgttttcaccagacgtctccggttactttaggggtgtgagaagcccaagtttcttgtccaattttttttgttcgaggcctctagacaatacgaggggtacctttactttcttcggtatcaccctcccccggtgcatttcattcatgcaacttagtcaaactcttcgaaatcacaaaagtatttacaatgtgatttggcagttttaattctttgtgcaaactgcattcactagtgcggtgtaacatgcattagtccctttctgctgtaatattttctgacatttcctatctagtggttcattctctccccctaaatgactagaaataattcttatttgtcaaggaatttaggcttcataatcatctccgtaaaaagttccccaccttcggagagagccttttgcaacgcattagtgggatatgcacataaaccacacggatgcaatagcactagttgcaggatgcatgtttatgccgatggtctgaattttctttcagagtccgcagctttggggactacatgtccttttctactacgggtattacaacaatgatatagcatatattgcaattcatagcttatacttggtccattcatgcggatatttggtacttgtgctaccaattcaccaatcatcaaatgcaatgctagtattgtcctcgcggacttctaaagatgatttagtgagttcaattgatgttcacgtgatcttgctggatcagtcttggtagagacacggtgtctaagagacactagatgtttgctgctttggaagcgcatttatccatatagtaccaaatgggagcccagatattcctcacaatccagttcagggatgctaaaaactatatgcgggttatgcactaattttctatcggggcatactgtgacacaaatcttcatgatttaagaaaattatgcatatatgtgccacgatcatacgagttgtaatatttattcttataattctaagaccggaaatggctgaaaatccattgctaaaagggtgtagcctaaatcatcacactttttagagagttcaacggggttgacggacaatagatgcttctataaagtgcaaaattgttccataggtaatatgactgtggcgcattctaggccgacaaattcagttgttgctgttagcaacagtcataataatattttcagttctatgggtctggaaaatacatttttctcttaaagtgttatttgtggttatgcggaccacaattcattctttttctcttatgtttgggcgctacacacaattcaaagcattataactatgtgctagaaaagagcaacaaaatagtaaatgccttaaatatgcaattttataccgaaaataattctctattgcagggaaaatgcgtgctctacttgggcaaggaccatttttcgatgcaatgctctattcaaagattgcaacaagtgatgacgaagtatattgattcaacgaggtatctcggtacttcggattcaattaacttcatagcgagcttcttgctcgacagctatggcaattatttactatcctgacatcaattttagggccgatccgatatagcataggagattcttcgtccatagccatgcaaataggctaggagctctcctcctcaaatcatgatgagtgtgctattaggattgccattttcttttaatgttcatagttctagattgtttctcct

SEQ ID NO: 50470 - DNA, 724 bp, Oryza sativa
tactttgattatgaacatattttacttgtcacaataaattataaaagggtaataattatccatgctctatatgttaaattcgggaagtttataatattatagatacatattatctcttaatgaacaatccggagttacaattgaactatgaacatatgaggtcaagatttataattagtacttatctactattcatgtttgttatatactccccagtttaatatatgaaaaagataaattaattgtgtaactataatgggatgtacaatatatgtgtgcaacaacgtataaggttttggtcgctactgtacatgagcttatttagaaagtgtactacccaatgctccaagtgattcctgaatatattgtagattaattatacattagctagtttctatgagtgatattgtatatgtgatgcgacaagtttaagcactggttctattgggttactaataagtggtaatcaatttaggcatatataagctattctatatggtattgcgtcgattaatttacttagtgattcctccacatctagctctattattattctcctaaacaggttaaagattcatctatgtgtgtttatattttagttgcataatcataaggctacacttgatttaaataacctataagccatggccatcgaatattaaataagtactagtattttcctatacatccattcatttgagacatcacataaaattagtttgtg

SEQ ID NO: 50471 - DNA, 2793 bp, Oryza sativa
ggtgtctcacagcaaaggccacaatctttcggtgtcctgtagcaaattttgccgtgtaagtaatactatgtacattgaacaaggtaggttatccaaagtagcgaatacgaataacaaggtggttatcaaaagtagcgatttctaataacgaggtaggttatatatcaaaagtaggtaatatagcagttaattaagatagaactatgaactcacaccaaaaaaagtaggtaagttcaactgtcctttgcctcacgtgctctaagagcaggtacaatagcagactattagtcggctataaatatattttaatgagataaaagatgagagagctgcagcacggactccaagacacagtgtgtgtatgacaagtgggaccatatattaatagtatagtaaacaactattgtataaattagctattagattgaatataggtgaattggagctagtagtgggctatactattgaacttgctcaactgtgttggctcatcagacaaaacatgtcgaacttgcatgtactaccgcgcctggaaggctgcgttcgagactgccgtatgactcaaagtggctgattagtcattagcggtatgattaattaaggattaacaaacacacagctctaatagattgatgttatgtgtacgtggtgtgcatatgatcgatgcgcactagatactcactctagatttatcaacaacacaaaccataatagttttgtgtcacaaaaaaaataacggaattgctatatgtgtcgccacaattttgttcattttataggaaggtagcctgcgcatttgcgcgcgcaggcaagcatgttagactgtgtttgagaaacttataaaggtataatattaaccgaaacttataatagataatttggcttgttaagattattcgaacatatttagaaaaaaatcataaagtaatcataatattttctctaattaaaggcactcaattttttatgcagtggctcagattattcttatttcagttagttaatattgcttatgtagtgtgcgtttaatttaacaatacatgtttcaaaacatgtcatgttgttgaattatttatttttattttggtaatttgaatatgtaatttttattttgattctattgatttaatttagctatgcatgtttgtagaatgattcattatgacataatatttattgtcaattctttaagatatttagatggtgtgcaaaatgcacgggtggactggcatatgtataatgtatcttatacattgttagtttaattgaaagagagaagagttagatataaatcggacatgtagcttttaaaaaattatagctgtttcaacattttagcagctaaaaagtaaggaatgggaaggcagtgatatatctgcatgtgagagggaggaggaggtggagggagtttattattctaaataatttaaaacatattataagttggtccatttctctccaaatttcttttgttgattctagagtttttaaggcataacatgtgtcgacttaagactttttttaaaaaatagatctaatgaaaataatgaatccatcgagttaagttgaattatttttgtaatttttaagatgtgatgcttggttaagaatcatcggttatatgaataaaaatgctaaaggtatgcttataattacaatattttatttttttatcggttatagttgtttagctgctattactttattaataactaaaaataaaataaaagctttaatgattgattaaaatctattttttactcgtatgtacctacagtataaacatagttgatattaaacatgtgaacactacaaatatattttttaaaaggagcatactacaaatctaataatctaataatgtttttttttactttttattatgatagaatggggggctaattattttttaatattattcaaagttatgttcattttaatctaatttattttttagcaagttatatacgatgataaaacataaattatattttttataattctataatccttaaatggcacgcaaaagtcagaaaacttagccctaactaatgtttctgctctaagttgaattaaagtggatatgggttttatgatttagatattatattttcttaattgtttaacataaaatttttgcttttctaaaaacgtgaaaataggagaataagtaggtgaaaaagaggggaaaaaattcagaagggaggaacagcgtacgtacgtacgtacgaacgtatatgccatcaggcctaggtgggcccggatatgaggagatgattctttttgtaaatctaatggttgtaaataatgggtccaccaaatttaatgaaaaccaacagctagatgttttggtttttttaagaatttctttaatttatcagagtgccacatgacgactaaggagtgtttataggatgccacatgtcagcttacgagcgtttgtagaaagtttaatggattttaagtatataatataaataaataatagatagatagatctcagatcatccaatgctgcattgagatttgcatgttgcagtcgattatctttaaaattcgtgctagtattctcttttaacttcgagattaaactgtatcacttatggataaattgctcatactaattacatcgtacttatagtataattacatacacacatatgtaattttgggatttagaattacatttaaatatactaaaattacatatgtaatttagtaaagccgactatttttgatgaaaaatatgacgctatcgatatagctacacccttaccgtatgcacacttgtac

SEQ ID NO: 50472 - DNA, 625 bp, Oryza sativa
agctcaacatgcaagcatataataattattatatctacgatttatttcattctaaaactaaacgtacatatgctaaatcatcattctcaaatcacttttataatatttcaattcaaataatttcatcatttctccattatctatttatctaacatacttcccgtagaaagcacgtcacttcatctagttagataattaacctaataacagtgtattaaactctctccaacccttagttctctcctatgtctaaatcgcgattcccccactgtcggcaatgctatcgctgtcggttttattagctgacactcactacgccagatcctcacacctctgacgggatacctgtgacgggcaaacgaattggtcagtattgaccattacctttgacgggttatacgggatgccggcacccgggaggcatctggccggggcccgtcacaggtattccctcacctgtgacgggccgaaaggaaaacccgtcagaggtataccagtgacgagtttttctttccacccgtcactggtatcccctcacctgtgacggggcgatacattaaaagccctcagaggtgatgggccgccacctgtgacgggtttcatttctggcccgtcacaggtgagc

SEQ ID NO: 50473 - DNA, 3678 bp, Oryza sativa
ccccccccccccccccgccctcctcgggccagatctgggagggagggaggggccgggagccaccgcccgccgccaccctccgcctctcgccggtagccgccgccctcaccccgcccctcttaggccagatctgggagggagcgagggaggggagcgccgccggccaccgccctccgctgccgcctccatcggtagccgccaccctccgccgctgtcagcgccaggaagaggacttagaaaaaatctagggtatgtagcctctatttatattcactatgtattttcgcaagcggaccacctaagaggtctgtctataaaaatgaagggtatttccgcctacaaaaatgaattttcacaggcgggcagcgggtttcaccccgatttacattttttaggcggctatttggctccgaaggtcatgtccgcctgtgaaaataaatacccaacgtcggtaaaaatgctttttctagtagtgtttcgctggtatatgtgtcggtaaaaataggttattgacccagcgcctgtaaccggccagttcaggatcaacattctgatccatgagtgcgagtcaaggttaatgaaattttagttttccaagtcaaaaagaaaaatgcatatgttttcgcccgtttagtagtatttcttgatggagatttaagttggaagaatggaaattatccgtgtggttaagagcaagtataatagtgagctataagtctactataagcttaggtggaggagagaggtagtgaaaaattaaggatgctgctcttatgcaagagctagcttatcacaagctccaagacaaatctattaaatgcataagtgagagataaagagaggagaagaaaattgtagccaaccttatagctattctattatatatattggctttaagatgggctaatagtaggaagtgggctctattattatccttgctcttacggttatggttagatgaaattagagtctatggtgcaacaatctccaactttattataagcatggatattaactaccctctgacaggagctacgtaatctgggcgtgagagctaattggcacagctgcgttgaccgtgcatgcttgtctcatgcctatggcactgcgttgggcccaataggcatacaagtatatcggtttagctcattagcttatcagtctcgtagcaaaaacttaaattttaaaacctaattttagaactaattttgatgtttttgttatggtagtttatttttaacattgccttttaagtcacacacatataaagagaaattttctttgccaagttcaccagtttctttatacgtcaacggaaagttattatttctttatatgccattggttgaactttttcttaccctatatgccatctatatcaccatcttttatacttgttttgactttagtcaaagtcaaactacttcaagtttgactaagtttataaacaaatataataatatttccattagcaaattagttttattaaattaataattaaatatattttataataaatttatcttggttcaagaaaatcactatttgtttctataaatttggtcaaatttgactttgagtaaagtcaaaacatcttataacctgaaacggagggagtaatagggacacaaaattacaatattacccttttaatccctcgaggggatgtctactcgtttatttgcgtgtcatccaaataattataaaaatatatttttcaataagatagaataatatgtgatatatcgcttcacaaatatgaaactttaaatttcacttttacaaatttttttagaaaaaaaattcaaatttggttatgagcacacgtatactagtttcaattaaatttattgtttttattacaacctgtgaagatcaaatttgaattaatttattgatatatcaaatattaatttatcttatcatttattttttaaatattcataacaattttaatgactgtaataacaaagggacatcccatggatggactagcaaaaatgatagaccaactataaggtgaaaccattatgcttaagtgcgtatgttaataatggctgaacagaagcaattagaagaatatatgagggtagttttattattttgctgaaagattgacaaggtgaaagcactttgaccgcgatagtggcatttaaaggatgaaattttagttcgatggtttataaggaaacagtaacttttcagtggtatataagaaaattcataaactttgagtggcatataatgaattttctcatatataaaatttttactcataaactatttttgtcgctactaagctctaccgctaataatctaactataggcgatacaatatgacttacaggtttgaaatttttgtttaattttgagtttttgaaatattcttaaataaactaaaatattgtaatagagcctttgtaacagaaagttttatttcccccgaaagagaaagttttatttaaaattttaaaaatccgagtaaaatttctaaaaaagtttaatcgtttagctcatactttagaactttcaactcagaaaacttttatagatatttcaatgacactaatgctggcactatttctttacacaagcaatggattgtttctttcttttgcaaccgatgttggataagtctgcttctttgtctactattaatatgaaaaccactgccctagcagtgttcatgctaaaaaaaatatgaaaattacgctatactctcttcagaccattttacaattttttggctacttgcatgctggaaggggcaattaacttggggaaaggattgggggaagcaacactggtgcgatgatggaatcatggacgaatgaccgcacccaataggatttaggctctgtttggggagctttagattctgagaagcagctgtttggtagccagcttctgtgaatctggaaaagctttgaaacccagcttctccagcttcttgcttcttagttcatttttcagaatctgtaactacagattctcagaagctatggattatttggggtagcttctagcagaagcagcttttggaaaaagctgcagctgggagaagctcccccaaacagggccttaaatccttgtgctctcaaaatttatggccatgtttgaaaaaaggaaatgcatagttctgatcctttggaatggtctcgatgcctcctatttcacaggaaataacaaccaaagctaaatgaaaaattcattctgaggaacacctagaggtcttccgactagctccacaaggtggtgggctagctagcctgggttcggagtctcaccccttctatttatttgatattagatcatttcttaattaatattcgcgtttttatgaaaaaattccttctcgctctcccctatgtttcctgtgatccaaaaaaaaaaaaacctcaggtttcactgtgatccaaacacctcatgtttcactgttcctgtgttttgaattgcttagtttttcatttacactcaaccacattcttatgtttcttccctgtccctgtctttttcattttttttagtgcgtgttaagggggtgtattcgtgatcatgtgcgtatggtgtatatatgtcttcaatgtaattaaaaaagagaggaaaatttaggtaaaggagtgtccaaattaatatacaatacataacctttcttactccctccgtcctataatataa

SEQ ID NO: 50474 - DNA, 592 bp, Oryza sativa
  unsure (1)..(592): unsure at all n locations
ctaatcggctgccttctattgacggatgttggccgattgtaggttagatatcgatattgccaaggattatgtaggatatatgataactcgacgaaatacataaacaagattagagtgtcataaagatggaagcactaatcctgagaacgcaagccgccataacaagttttacctcttgttgaagatcgaaaccgatgcagctcaacccgaaagcaagaactcgtcgaaataaaactaaagcaaaaaggtagcgatgcgccgggattgtattgaacgtgtatgttaaaagtaacataggactcgggtctatttatacccaaaaatcacaagatatgtccataacggatacaactactatctctaacaaactctaagataccataagtctttgcggcagacttttgcccaagcatatctccaaggagattacataaatcatcctaattaatagatacaattggcttctcaagactctatccatgtgcggcaatcaccttaaagcgccttaatttaacccgatatcatacatcagtatgcattggccgaatcggctgcatttgcttacctagctcgactaagacccagncgatct

SEQ ID NO: 50475 - DNA, 1494 bp, Oryza sativa
acgtggttcacgtaaggaaatgtgtcttgtgggtaagatgtacacttctgatcagagtatatctattcgaatagccgcgccctcggtatgggcaagccgagcaatgtacccaagttagtgttttattcttaaaacctgctcaacaactaaaatgtggaatggttggcctgggttggcttgggacgagctgggacccagggtcgggttgccagttcggtctgaatcatcgtaggccttgggttaaggcaggttcgtgtgggttcacggccttgattaataatattgtgtagctctaggaccgtagttacaaaatagctttgagcaactaagtgtcttttaatgctgtttactgcaaaccctaactctctatattatggctcccttgtactcccttgcatttattctgcacttgtgggtgtgtcttgttgagtacggtggttgtactcaatcttgctcaattttttcccaaacccagaagaggagttcctggaagatgaaggctttggtgtctagctcgtgcctgccgtcaagcgcctgtggtcgtcgccctagtcttccgctgtttttcgtttgtcttcttgtgtgctgggccttcgccgcccatgtaataaattaattaattacgcttccgcctgttaaactctgaattgtatcaacttttgtgtaccttgcctcctgggacaaggaataaggaataatgcacgcacgtaaggaacgcccgttgggttatttccggtcgtgacaagttggtatcagagcccccttgaccctaggacgagccttagatcccaagcctttgcaatattttcaaaataaaaatgatagcgaaaagaaacataaaaacacgcacaagctccatcgggcaaaagcacatatgtgttatacaaaggagcaaaaaattacatcatccgtttcagaacatttttgccccgcccctactaagtcccgcgaacacggttcgtcatctatactgtacacgactctaaggggggaaggaagtgaaatacacaccgacgtcaagcgataacaacttgacgattagtcatttcgaagtctaaccaaagtgtggcaatgtcatcgcggcgctggatgtggcaccggccgtaatcctctaaggttcgaccgggatgtcttcgcctccaattcgccattttgacaaccacagctacataaaaggcgaatgcttgatcgacgaaaacgccaggggggcaaaacgaatcggccgaagcatcgctcgccgaacattgaaaccgcaacagcttgtttcggaataaagataccgaacgccgttacattcaacttacgcaaaacacaagcgtttttcccaacgcaaaatgctacgagtcgaaaacggaagtcgaaagctaaaaagtcaacaaatcttttcgccaatccccaaaagggggccgaacgcatgactttgggcaaaatccccgctaaaacaatagggaaaaggggaaagaaaaaaatacaagtcaagaatcgcgcaaagca

SEQ ID NO: 50476 - DNA, 585 bp, Oryza sativa
atattttatctttgatgtagtttaactagtataattaatctttgatgtagtttagctgtgtttgattacggactaatgttatcttcaaatcatagaaaatcccagttttaaataccatttacttttccaaataatgctaagtgtgcacgtatcgtttttcgcatcgaatgtatatttgtttagtttatttctgtctaactctccatatatacatggggagttggatatttaatggcctaaaataccgtgtttaccactttaatgtttgtgaagtactcgttctggtttttaatggtttttaatgtatgacgtcattaaattttgatatgacatttcacaatttgcattaaaagaaacatataaatgatatttgttttatcatgacttgttttatcataaaaaaatctataatctcaatttataattttacatatttatatatttttaataagaagaatggtcaaatgttatagaaaaaaaaagaggaagtgatatattttagctttctctgagatgaaaaaaaatctgttgaattttattttccaatcatactacgaaaaatatgtagcaacatggacaaatcta

SEQ ID NO: 50477 - DNA, 1465 bp, Oryza sativa
  unsure (1)..(1465): unsure at all n locations
ttttcaattcagtttattaaaaaatctaattatttttatattattagttaattctcctatacaaagaaatacccttgggattgttttgatttatcatttttttattaattctaattaaccaggaatgatatttttaattattgttctttttatgcagtacgtagcaaataacatctgcattggatactgcatcacatgatgcaacaattatatttgctctgacagaaaagcgtcaaaggatttttaatgatcaatataaacagtagacaatatatttgcatttaatctaagacaggtctgtagacaataacacataaataaaatagtctcagaaggtaagttgatcaaactgattaatctagcaactataataggtctgataacatgatcctagattcctaatctctaaatgcttgcaattcgacattagcacatcctagaaacgccagaggtcatcattctcacaagttcttccacaatgaccagcttgtggcgcttcttcagtagtgttcatcccattctgaaataaaattacaaaataagctacaaagttactgaaaaactataagggtaggtctaagtttgaacttatgaatgatacatagcagtccatttctaaattgaactcactaactggtatcgcaactaaagccataccattggcagaacatttttaaattgatctattgttgtccaagaaccaaatttttcataatgtttgttcaagagaataaataataaggatgtacagtagtaaaaagattgaagtcagtatataccatgagaagtgcatgaaggaactcagggacaacagaagaagatggtccatttgcatcctgtgatttgaaaaataataccagttagtatgttctttctaggaaacaaaaatagctttaatttatacttacatgggaatgagtttctgccttatccttatccactgtctgctctagcctttctatccntgatgctagttcttgatgagcattgttcacagcattagtgactgcctgctgaacaatgtcttgcacttgctgctgtgtgtatagtggctgtgtctccatgctaccagatggtgcacttgctgaattaccaacatggtttctatctataattcctgaaagaccataatacattccacgttttctacctttagtgagctgcacccaaacatgttgtttgttgacttgattgttttctccttccttgacacgatcattatacaccacctaattaagatatgtagtggcaccattgcatggttttagatgatttcactttttttgattgccaaacttgaaactagaaactagaataagcagaacacataccgctaactattcagctttcttgttggcatactgtcccttgccctttgcatgtcgatgtgtgcgttcaaagacatcaatatcatcaacatccgtccctgcattctcaattatctatccaaaagtacatatcatag

SEQ ID NO: 50478 - DNA, 529 bp, Oryza sativa
attttctctaattcgttagagtgtcacgtggtgcgtcacgtggtgacatagaagagtttgtagagtagcacgtgttgccttaggagtgttggtaggaagtttaatatagtttagtatgtaatactccctatgagttgataatacttgtcgttttgaacaagggcacggtctttaaaaaacaactttgaccattattttttattataatatgtataaaattgttagcaaatatatgatcttattaaagtactttttaagaataatctatacatgtagtcaccatatttgaaagacaaatattttaaaaatgattcataatcaaagattctaaagtttgacttcacccttatccaaaacgacaagtattatcagctcggagggagtagaaatctatgggttataatggttgattttattttctatttcattgtctaaaagaaatttaatcttaaattttgagggggtggacggatagacggacgtaagtacgtacatacatacgtatatacgtggtggggagaggaggccc

SEQ ID NO: 50479 - DNA, 1078 bp, Oryza sativa
gtacttttgtttataaccagactgagccacaaactaagccttacccactagacatgtggaagtacggtagtgctttgcaacagaggcccgaagaccggtccttatatggccgaggtgctactatcaaaaccatgcaccccgagcccagcctaaaaccattttgaggattttgaatagagggggaggtgtgaatctaattccacaataatccaaccattccatagtgtccaggtgatataaatatcccaaagtctagagttgtaaaaccacctaatgttggctaattaaccagcgaagcatctacctaaaatcatactagtggtaccatgagtagagtgtccactagttggggttttgtttaatctagggtgaacaaggtaataataacaataataataataaggtcataacaaaagtaaataggcatggctagataaaacagtgataacgcgggaatttaagtaaagcgataatgcaataatttaaatcaaaataattttataaactgggattcaatatgctcaaggatgatgtgtcttgccttgctcgctttcccaaatgtcggcttcaacctccacgaagagcggaaaagagaaggcttttactctaataaactccatataacaagcaggaataaagcacaaaaattggttcttgacttcttaaggaaaaattagagacttgaacggtccaattccgagttcaaatggccaagttatggccatttgaagtttatatgctctttaaatgaatatttgcgaatttcttcatttaaattttaatttaaaaaaggggtttattgcgtcagctgagggggagggggcgcgcggaccgggtccacgggagtggggcccacgcggcagcctcacggtccacggtggaccggttgcacccaggctcacactggccggcgccgtgggccccacacgtcagccgcacctgagggcgcgggcggctgacggccgggccccacgcggcagccactcggcgcgcccgagggcgccacgccggcgtggtcagcaggaggcggcgtgcccgcttcccgatggtcgccggcggcgaccaccggcgcggcgga

SEQ ID NO: 50480 - DNA, 538 bp, Oryza sativa
aggaaactttactatggttgtgtaccaaacaatacaatggattgaaaacattgggttagagtggattatatttttctttgttttcccataaaagtggagggatagaaaattttcatctggtgcattcctttgaacgaacgatagtgcactgtccattccaaggactatatattactgtacttttccttcacaataagccctagcagtgcaagccacgcttggcttggcgtgccttcagcctattccaacaaggattttggaccaaaattcatctctaggtcacccaccccacagtgctgtacccacgtcttcctcctcatcctaatccccacgccgcttttctcggcttttcatccccacacgctgattctcgccagaccgcctctttcctctcccctctccacctcaccgacggcggtggcggcgtcctcgatggcggaggcggcgcggtggcctcgctggcggaggtcctcgaggcggcggctcagatctggacggacggcgacgcggcggcacacgtggcggcggcggcggctcg

SEQ ID NO: 50481 - DNA, 596 bp, Oryza sativa
tgcaccccagcagctgcctatcagttgagctaggcaccgttctcaacagagttatactaaacggatcatactaccagaaacttgttaatccgtaacggattcttggtgatggattcataaaccgtcacgacagcggcaatccgtgacgataatcttttttccgtcatggacgtgcaccagtggttattcttggcccgctaactcatgatggttttatccagatcgtcacagtgtgtgattttaaaatcttcacagtgtgaagataatcaaaaggcatttcaaaacttgttttgcttgaaaaggatttgaatttgaggttcaaatgaattttttaaaaaatgaaaaactacactctctcttgggccatttctggctgtcctgcagccccacatggccacacccacactctctccttctcttgggctcggcccagcctccctcttacgctttcccccttcagctgggcccggcccattttccgcatgggctagccgcaggccacctgcgccttgtaaaaaaaaagagacaaaattgtgtagctctttaggggattcgaacaccctcaaccaaaagcacaatatccctaaggatccacc

SEQ ID NO: 50482 - DNA, 1485 bp, Oryza sativa
cccctgttgttttcccagaagaattaacaaaataaacaggccaaggatttgagaaataaaatgataacatattagttgcaaggttaatcaatactggaaacctattttatacacacaagccaaaacaaaatcaccaaaacttctaaaaaaattgtacatgtacttttattgatattagccctgctggtaaagtctcctcttcaaattcaacacacaaatagggaggaaaaaaagtaggatagatttatactctcaaaactataagattaatttttttatttgtttttttaggctaaaatataatgaatttgaggttatgatttgacacatgaatgtaatattatttgaagtatttgtattttttttagagtttttgataaaatttgttagttggtatatatgatgtgtactctagaaaccacgtgtacacgtttctcaaaactaaggttgtgtttagatccaaaatttagatccaaacttcagtccttttccatcacattaatctgtcatacacacataactattcagtcacatcatctctaatttcaaccaaaatctaaactttgcgctgaactaaacggcgcctaaaagaaaataaagcatatgtacacagcattaattgttcctaatgaatactactgtactactgtacgtacgtttacgtctatatcttaccttcacttggcttggacccacgtcgagaactgggcacccgtccgatgtggctgtgatgagtaccgttgctctctgcggcacctactccctccgtccaaaaaaaaaaaagataaacccttttttccgtatccaacgtttaatcttccgtcttatttgaaaaagttatgaaaaaaattaaaaagataagtcacatataaaatattaatcatgttttatcatctaacaacaataaaaatacgaattataaaaaattttcatataagacggacagtcagagttggacacgcaaactcagggtttattttttttaaggacggagggagtacgttcatcccagaggctccagctcctaatcctactgaatacaaaaataagtcgtccgggggaattgatcaagaaactaaaatgatatagctagctatgttaacaaatacatatatatggtttgttactggttgagtgtcttacgacagaggctagggtgtaatatatctttatatattattactaaaggattcaattatggttatttgtgtttatcttaccatctcccgcctggttgtgcccatcaccttgagaactggcactggtggagaaaccatctttcgtcggtcggccgatttccacaatagtcccggatgcaataaaaaccggggctaaagatgatctttagtcccggttcaaaagggaaacgggcatatttgatctttagtcccggtttgtgttaccaaccgggactaaacatcatctttagtcccggttcgaatgctgtcaggacctgtcagacccccccgggatctttagtcccgg

SEQ ID NO: 50483 - DNA, 750 bp, Oryza sativa
actccttctgattcttacacttatggcatggacaacaaataaaacccctttgcctgttagcttcggccactctcaaaaaatagtgcacgccgtcaataaactctttggaccgccggtcagcgtacatccattgccgatccatctacatgagtcaaaaaaaccgcacacaaataattattcttacaataatgacagtcatacaataattataagatatctttattcatacaaaaatcataaaatattacaccaaataattcttaaaaactatttgtaaagttttaaactaattttaatgtgttttacttcttttaattttcattttagtttgttttctattatttaagattaactttcactagagttttccttctcaactattttataaaaccttgtttagcaaatgaactaaatttctatatattctttcttccccacacacattttctctctcatcaacttacaactaaattttggagacaaaaaatagtgtgcaaaacataggtgcaaatgtagtatgacaaaaaaaaaacattggaggatgaagttgcaaaccttttaggcacctccgatttgtatgtaatcaccaaaataaattcaatagaaattttggcatgacctcccctcttttttgaagtaattttgaagcttgctcgggcagctggaggaggaagaagacatatatataggggtgggactttagtcccggttggtagcaccaaccggggctaaagatcaccgggatcatta

SEQ ID NO: 50484 - DNA, 4735 bp, Oryza sativa
atatttgatggtcgtttgtatcgttgactaacccgtttcaactttaaattttttcttttccttgtctatccagctaagaaaggatgctgttccattttataagtacgtcattatcttaaaactttttacgttattatatatatatagtttgcgcatgcaagtttaacgagcaatatacatgtgctgacgaaacttttataatctttttcattgacataatgccaggtgtatgtgacttgtgaggatgcaagagcagtaacctttgatggacgtacgatctctctgcatccaagctttgtgtgcaaaatggctggcggtcgaaaaaaacaaaaaacaaaaccaaaaccgaaaaaaaccaaaaaaaccagaaaaaaacagaaatagcaaaaaaaaaaacaaaaacaaaaaagcgttcaactttgagcccacaatatattcggattagttttctagaaggactccatgtctttttctattaggtgccacctatatatactcttgtaagctatacgggaagggactcttgtaagctatacgggaaggggtgacgttctcattgttattcccctacgtttgtaatcaactcttctatagtgatcattgccggtcggcgcccgtggttttttctcgcaagggtttttcacgtaaaattttatgtctttgtgggccatctatttttataacatgtggtatgcataacactcaggtcggcaaaatgggctattgtatgtatatttgtcgtcctttgtactgaaagaaagttattactagtaaagatgaagaggcgtgttgtggaattcccgtttcctccatgacgctgataaatttgaatgtttctaaaaaatatatatattgtttatttaccgaactattcctcaacaaggtaggcccttagctggcagtagctggtgacacccaaataatttggtcccgtctaaaaaagtccagcctctaccttccgtgagcctcgccgcaataaaaaaaacaaagtgggacctaccataatattattactccctccgttttaggttataagacgttttgacttttattaaagtcaaactactctaagttagacaaaaacgaaactctgtagaaaaaaagtagtaatatttacaacataagtatagttttcattaaatttataattgaataaatttttataatatatttgtcttgggttaaaaatattactacttttttctataaaattagtcaaacttagagtagtttaaatttaaccaaaatcaaaacgttttataacctgaaatagagggagtagttgatttcaatcttaccggtgataagttaggccatatggtagtttaaaattgtcctcaacgtattccctgctccgtcaaaaaaaaattaaacgtaatctggggtatgcagatttatctttaaaaaaattaaactttagttgaaagtactccgcccaaagtcttcttatcatcttacctagaaacactcattgtcatatatgtaaatactattctttcgatactattctcatccaaaattaataaactgaaaattattttcaaataaaatttaaaactttatattaaaaatgaaagccatattcaaaatatgaaaaaaattactcaaatttttaaatttcaaaaaaattgaaaacttttaacttaggatttgaaaactttcaacatatgattcgaaaactttcaactcaaacataaaaaattttcaactcgaaatttaaaattttaaagtcaaaatttgaaaactttcaacttttcatctcaaatttgaaaacgctcagttgaaatttaaaactatcaactcaaaatttgaaaacttttaacactaggtttgaaactttctttatactggaaaactttcaagtcgagatttaaaacttttaattccaaaagatttgaaaacacataagctgacaactaaaaaataagctgacaactaaaaaaatccgaaaagaaaacacgggaaaaagagggaaaacgaacaggtggcaccaaaatagaagataaaaaaaaaaaagaaaacgcatgcagtggcgccagctcgcgcgcgcgataggaacccccgtgtccatctggtgagcgcaatcaaaatgtactgggaacctagcttcaaggacgaattcaatgcgaaccaataagcgggccgaaatcgaatgaacgaacgaacaaggtgctgctcaacaaaggagtggctgacggccgagctcaatatgccggtgagctccaaattaaatcaatccacgacaagtacggagtacatggaaagtgtcaaaaaaatttaaacaacagtaaaaaaacaactcatgtttgaaattctagggacgacatacagaagttttcaaagtcagttttaattaatcagtcaacttatgtcattaagcgggcagagttatataagttcacacggatttggaaattattatacattattttgtcccaaaccatagggaataatgtctcctgttttagatcaagtgggggttagcaatcaactactgtttcggatctagcagagattagcgaactacctgacaaagaatctcattttaaaattacgtaacgatcgaactattgcaagactgacccttcattaattaactacaaccaaattaatttctattttgcgaatagaaagtaatactatgtgatattgtacgtatgtacaaatgcaattattgtgtttgaacatgccaacacaactcaagattgatggatacatggactgatcgacaacttcgagtcaatatatatttgcgtgcgtccgtatgtgtgattattcaatgtgcaattcctaaacctaaaatttaaattcatatttgtaattaaatttttagtcacctaaaattgcactttcttaaatctttaatttcagtcatacgtacttatgtattttttttgcacgtaattgtaacttctaagaatagtaagagtgtgtatatatatatatatatatatgggggcaccatggtacccgggcatcatggtatcaaatacacaaattcacccaaatttttcaaaattttcaaattgtgagtatatacctagttataagaattcgattcatacctatacttatcaacaaaacaactcaaatttaactttatttcacaatccatgattacgtacgtaactaattatacatttagatgctatatacctagaaacaaaatctaacaaaaacaagttcaaattcagttcaaacttgcttcgaactagttagtaaagtagttaatgttaatacctaaacatttaaaaaagtttcatactcatttgagttgagtatgtactcaatttcaaccatgttgcccgggcatcataaagcaccaaacttattatatatatacatatatatatatatatatatatatatatatatatatatatatatatgcgcgcttgcacactatacatatctacacaattgatagcttataatgatgaacagctgatatgtattaagggatatctaataatcagcaagcgggttcatcgatgaattaatgcatctaattaatgggcaatgttcatcgttataacgattctaattaatcgtctaattaatcactataattatcattgatactccctccggttctattttaattgacgttttggacaataacacggtctacaagatacatctttgatcttacttttctattatagtatatataataaataaatgcatgtttaattttattatagtattttaaaagataaatctatatatgttgttctagttcctttaaactaaatatttttaaagttagtgatggtcaaaattataaaagtttgactccaaccttattcaaaatgtcaattaatatgtaaccagagggtcaataattaatatgtaaccagagggagtagcttataatgatgaacagttgtagactagctagtaatttaggctcaaaagctgtgcctggattatcgtagccccaaaatcactgacccaatgtagtactcatctaattaactgtttttttataatgaccgaatgtttgactgttaagattacacagtattatttcgaaccattaatataattagtgaatttatatatatttgaatgatagacctatatattgacgatgcaagagcccattaattgagagaaactcccatgataatgcagatataatatgtttccacaaaacaatgacccaagctagctagctaatagctatatgccaaatgtgtcatatatataaccaaattaaaccagattagatatggttggcagaactgacaaacatatactcacctgttataaattgatgtgttttcatgattacaacacagttgactcatggttccacacgctaacttgacaccaaatggatttccatgggagattaggacgggtcaacaagacttcattctttttctttcctgtacaggaatatatcaagtaaacttaattagcatgaagatcgtctctgctctaattttttttaaaagcaatatgattttaatggaaaatcacaaaactataggtcagttagacgaaatcgcaagtttagcaccctgtcgaacaaccgcggttcgacagggatatctatcgaacaaccacagttcgacaggtacatgtcgaactgcgtcagttcgacagggtaggtggtccaaaaataaataaaaaattacatgaacagtatcactacaatgctagacagggacatatcgaacagccaaagttcgataaggttgcgtgaacagcgcgctacagtgatgct

SEQ ID NO: 50485 - DNA, 534 bp, Oryza sativa
taccggggttaactactttaaaataactgtgcatctaatttccaactggtttgtatatttatattatttgtgattaaattaataatttaagacccatgttaactatattttgactatagaaatgatatgccacatgggctaattttctacacatcatgtagctaaattagatccatgataacaatgatgacgatgctctacgtattttcatggggtctataattttttatgtagtgtcaaataaccaactacacgcatcaaatttaaaagatgaaaaatgtatatatacaactaaaatttgatactataatttaagtgtaccaattacttaataaaaaatgtgtctccactaaataaaaaatagactaaaaacttccgcgcaatgataccctcacgaatcccatatattcttttggtcttccctatcttccctttgtctcctaactcttctcaccgtcctcctaatagtccccaattcatcccataataaactatgataatatatatgcaattaaaaaaataccttacttttac

SEQ ID NO: 50486 - DNA, 2888 bp, Oryza sativa
acggcgttctgcgagcggagggccggctcgtcgtcgctgtcgccgccccgctccagatcccggagggtcgaggggaagacgaagggcggcgccatctcgtcgcggcctcggcggagtcgcgacggcagcaggacgacggcggcggcactgggtggatggggtggcgggcagggaggaagccgagacgggatggggaaagggggagagagagaggagagagggggtgggacccacaccagatggccagccgtcctggctggccaactttggctagtgaggtggggaatttagccagccggatggcttggagagccatttagctagtctgttggagtagatttttttgtccaagttagctaaattttggcttggagagccatttagctaggctcttggaggtgctctcagtgaagtcactttcccgaccattccttctacatgctagaggtctctgtctcaaaatataatataaaatgtaatagaatctaaaatacccgtaagaattggtttggtaatctaaaatacccgtaagaaccaaccgacaggtttggaactcgtttttttggacggaaggagtaaaacaattagaaaatctagaactttgattattgcaaggttgaaaaaaaagaccaggatgtacagtagtgcagtcaagtcagaggagtgttctctagctctagccggcaatgaaatgtgttccgagtcatagcagtaatttgctccgaaatgggagtacgtagatcggaataaaatagctaggaatatcatttgttccttcgtgaaaatcttgagcaaaattaagtccatggcggcgaccacgcttgcttgctgtttctcttcctccatggatctctcctgcagcgcacggctgatgccgttgaggatacgatcacggcgagccggccgctatcaggcaaccagaagttggtatctcggggtgaaaagttcgcgctaggattcttccggtcaggtaagctaattaacactgaaacgctgcgcgttactgcagaagtttagtactccagaagtaagtaataagtagacataatgagtaagatagatatatggtagtataagtttacatgagttgatatggtttatgttaatttaaatagtatagagaataatgatttaaatgtaaaaataaggtgatgtgattgtataagataaaaaaaggtgaaagataatttgaaccatagattatctaagagataaaaacaattgaggtgatatggttcagtgagagaagaaaataaggaagaaaatttggaccatatattaatcatcgaagagttaaaaacaattgatatggtattgcttaatggggaacatgaggaagacaatttggattataaattaatcatttaagagataaaaacaattgatgtgatatggcttaacgagagaagagagaaataacatcaactaagtgaggatgcactatatatgtatcaatataggatattataaaaaatagagtgatatattaaaatattatgtgaattatgtgagatgatgtaacatgctagtattttaaagctttaaaatttaataaattgtagaattaatagataatatagcatgttgcatgatgtttaagatgcatgctataaaagtgtttcaattaggaatataattataatatatttttttcatttgaaatataattatatgatatcttattgtgaaaatttaattgcagcggatacaatgatacaatcaaatcatgtatctaataaatagtttagaagaaaatatattataaaatttgcttacaactttgttaattagatgtagaaaaaaaatacaaaatacatagtacattgttagagcacgtgcactacgtgagggaaacagcacgtcagcacatccatttttcttttgtcatccatcgaatgtccgacttgtagccatccccatgaacttgcattcaacgggccaaggcctaacccatgctggttctttctttttttttaatatgtccgcttgttgtcccctaactttacgtcgagtttgtttaacatcctttatcgccaataccaaaaatcttcacctctaaactattcaaaatcatgcgatttagatcccatagtagtatggatgcctggtttcgctaatgtggtgtcctagttcaaaaaaaatgtgggactcacatttaagtaaaaaatagggggctcgcgtatcagtgtcctcttcttcattctcttttcttcccaagcttagaagggagggggaggtggctgatgggagattgagagggaggggcagttggtgagcctggaaggaaggaggaggcggccggcggaagagcggggctctgcgtccctagaagcctgcaagtccaccagctctacgtcctcggccattgcgcctttgtcatccctgagcgggaacagcaggtccgtgatccggagtttcctcacaagtgccgaagttcggccgaagctggtgcgccacagcgtcggagacggcatcgctgactccgcgagacacggcggcaaggggaggagccacctgctgggaagagctaccaccaacatcacccacaagctggtctcagctattgaggatctcgaagacgcgagcgatgttgtaccactagggctcgccgccgttcgtgttgtgcccccggcaatgtccactgcggttgttgttgtggtggcggcgcttggttaggatgagatggaacaaggtaggaaggggttgctgtaactgaactccacctcacggtcggcaccgcgcaagtcatagacagcgagcactgggtcgaaagcacggcacaagaacggtgggggaaacgcttgatgcagcctccccctccctcccaggctcgctagccgcctctcccccatcccccatctcccgtcggtctcttccccctccccaat

SEQ ID NO: 50487 - DNA, 2610 bp, Oryza sativa
aaggaatggcttcaggtccttttgcataaagctaattttacaattcttttcacaagcctaaaacctagcatagactgatcaaattttagtaccagtgttcactttaaacaacgacggttctgtcaaccatccattgtgatcccaaggatagcttcccgccattgaatcgtcatggttttctgaggatgtccaccttccctcctctcgggatgtggctccatcagcataaaattcatcatgcaatatcccattccccacaagttaagaatttagagtctagccaagtgtaatacatgtcccggtgctcaataaccgcgagcacggctattcaaatagatttggtttactcacactgcagtggatgtacactttacccgcactccgcgactgcccaacacatgagcctcgtcccaacacatgagacgcgtcacggcaaagcttttcgataacctcgcattggcagtacccgctccatgaacttaaatcctcatgcactctaggcgtccatgtttctagcagtgagaggagttctggcgctcccgggaaagagaagtctcacacgcatattaaattatggttcaagttaagttctctctctcacacactcatggcagtcctaccaatggcgacaccgatgcagggcacgcctctcggccctacctcaacggctgtcccatcgtagcgcacctgcctcactcaggggtgaaccatctatgcagggatactgcctccgctcggctatctaatccgctaggtctatacccattcgagaagtacggttgtacgggggtcgtttcgtgcttaacttcatggctcggtccttaattgaccggggacggtactagccttttccagataccacccaaatcctccgtccgccccagtcgaaaacagttgtttaattttatttctcctttcacaaatcatgtcatcaacatcatggcaatgtggcactcatgtctccacatgccgcatctcaattaccttcccaaaggtaattgcccaagcatatagcatttgataaatatgagtatgcatgattctagaatagcatttctaagcaattgtcatagttgactagggactcatacgtaaacatggttacaaagatttaagggtaaacaataatcaaggcatggcataatcacaagtaggatgttcatcattgcatgcaattttatttataaacaaaacaatttcgcaattgggatcaacatgttcaaggaatagtgatgacttgccttgctcaggataatccttattattgctataatcttgatcaaccttcacctcctggaagttgcagacgttgcctcacgactaaccgatacacaaggtctataatacgcgagaaaaaccaatattcaaacaacaatcaaatatgcgcaataaaatgtactattcgtgtttgctaatggatcccaatcatgctaaggctaaagtttcttaatctttctattgtcatcgtggcctatttaggagttaaccaacatagcatttatgggatacatatatatttggctaatcagtggtttagtctatcaaatggctatggaaggattttggctatgtatgcatctatctaaataggacggttatatactagaggttctgttgctagatggatttaggatcaatcaaacaattacagtgaatcatttgtattatttattttattaatggaagctttactttaattatgaacatattttacttgccattataaattataaaagggctaataattatccatgctctatatgttaaattcgggaagtttataatattatatttacagattatctcttaatgaacaatccggatttacaattgactatgaacatatgaggtcaagatttataattagtacttatctactattcatgtttgttatatactccccagtttaatatatgaaaaagataaattgattgtataactataatgggatgtacaatatgtgtgcaacaacgtataaggttttggtcgcctactgtacatgagcttatttagaaagtgtactacccaatgctccaagtgattcctaaatatattgtagtttaattatacattagctagtttctatgagtgatattgtatatgtgatgcgacaagtttaagcactggttctattgggttactaataagtggtaatcaatttaggcgtatatatgctattctatatggtattgcatcgattaatttacttagcgattcctccacatctagctctgttatgattctcctgaacaggttaaagagtcatctatgtgtgtttatattttagttagataatcataaggctatacttgatttaaataacctataagccatggatttaattatatggccatcgaatattaaataagtactagtattttcctatacatccattaatttgaaggattgattataactaaattactaccaatattaatctaatctgatcaagaaacatatttttataattaactcggaacttcgaccgaaatactattacgctcgaggaatttccaaaaataatctatgattaatcccgaccatttttatttcctaaatcctcctaatttcttatttatttccttttcctttttttttccttcttttttt

SEQ ID NO: 50488 - DNA, 589 bp, Oryza sativa
ctgcagcccatacgcttattaattagagtaataattgtactctattatcaatttgttattgtgtgcctcggctgattcctggacgagggttcacacacatgtaagcgtttggaattttggatagaaattccgggcgtgacaagttggtatcagagccccttgaccttaggttatgccaaatggttacccatagaagccctctaaaaatattggaaaagtagaactgttctcctccctttctcttttaattaaaccaaactaatggcacatgtactttataatcttttttaatggttctcattcaaaatttattccagtgttattagtactgtacatctattactgtactaatggctcattttccagcaaaagttttacaatgttgttttatttaatcctgctgcaataaaataaatttagcatgatgattttataacttgattttatttcttttggaacctgttattcaaaagtacaaaacttgtgaccttgttttcaactatttcaacttatcttgcaagcttggtttactttatttacttacctttttactttgactctctaaactttattcaaattaatcccaaaa

SEQ ID NO: 50489 - DNA, 860 bp, Oryza sativa
ctggtaccctccgtttgtgccgaagtgccgccgttcgccggcgagcgtgcgccgcccgagccgtccgctccgccgagccgccgccgctgtcggtgacgtcattgccgacgtcatcggggtcgtccgccgtgagccggtcgtggaccgttcgatctcggccgtccgttcgcgtgaaccgccgcccgtgcgcccggtccaccgaaaccctagcccgctgacgcaataaaccttcttttccttttcaaaaataattcattattgcgtcataattcaatttaaaccgatataagtgttttaatccgatttaatctgtaaaaattcataactaattcatcttagctccgatttagttggttcaagtctctaattttttctaaaattgagatctacacattaaaaatatccacatgtactgttcatgcttgtttatgtgctgttttggtgattttgctcttttctgcttagattccgtcgtttttggagagtccgttttcgccggagaagagtttgaagagttccaaggccagcaaggcaagtcacacagattccaaacaacccttggagcatgttgatcccgtttaaagctattgtttcttttcaactattgcatttattttcgaatgtcattgggtggaattaacctattgtttgttatagcccttttgttcttgattactttattccttgataccttgggttataataatttgactggttgaactttatttatattggttcaactagatattagaaataattgcttagccctacttagaaacattaccacactattgggataacttatgattcactattatttcatgatggcttattgataagtcacgatgggtcaatcctga

SEQ ID NO: 50490 - DNA, 958 bp, Oryza sativa
cttgggttaaggcaggttcgtgagggttcacggccttgtttaataatactgtgtagctctaggatcgtctttataaatggctttgggcaactaagtgacttttaaatgctgtttactgcaaaacttaatccctattattattcccttgtacctcccttgcattaattatgcatccgccggtgtggcttgctgagtactgtggttgtactcattcttgctcaatccctcccctcttcagtaagagaagctttggagaagatgtcttaggtggagtcctggcttataccccagttgagcgcctgtgaagatggagccgtaggcccgctagtccgctgctgtttatttttgattgtcaggcctgaagcgcctttgtaataatgtaaatattatcgatataataaagatgtgtcttttatatcatgtttgtgtggtgtaccccggcttttcctgggacggggattaatacactagcgttcgggaaaaggcaattttcccggtcgcgacaagcaaatccaccccccttacaagaatctcgtccccgagattcgaggaggctagcaagaagataggttgggcggtcttctcttcttgtctgacttcttccgttgcgtcttgacgaacttccagcaaaactttaccactcggaactgcttggcttgacctcctgttgcggatggaatcttctcttcacctgacttggaccaggatgcaccttttggctgactcagactaggttgcggtagttcagtgatgcttccgttctagaacttctcatgattcatatcttcggagtcaacctcggacaagttatcaacttcatgtcatgcgtcgtaacctgcttgtcattactaggataccatgcttgttatttgcttctaactcgccaccaactgcctcatattagcttccctggtctccgggtgatagctacttctgctatttgatgcaagggtcgata

SEQ ID NO: 50491 - DNA, 674 bp, Oryza sativa
ttttccggtgcgtgggggaaacggcgcggacgtgggcggcgaccgcgcccacgcatgcgcgggagagggaaccgcgcgaggaaggcggcgacgtggggagcacgggcggccatggcggcggttgtgaccggcgtgaggaaggggatgggcctgacaagtgggtcccgcggtcccacttgtcggcctaagggagagaggaagggcgagggggggggggttatgtagatttttcaagggagagagcaagcaggccgagcggatgggaggcaggaggccggcccagatagagagaagaggggagggggattgggccgggcccaaggggagaggggagggattttatttgttttacatttaatttaattggtttaaatgaactttgtattattataattacttcttgtgctccgaaaattcgcgggaaatttcagagagtattttagggcacaaagaatattacaaaatattcccgaccaatgatttttaaagggaaaattttaattctcccaataattcacttggataaattgcttaactttttatttaatttctaggaaatgcattattaaatgatttttaatcccgaacgaaaatcggggcgttacattcttgctcttggtagaggcagaagcgcccgcttgcttgctgctttgctttccgtgaggtttcttgtg

SEQ ID NO: 50492 - DNA, 1447 bp, Oryza sativa
ccatgcacccaaagcccaccatgcagtcgcattttagttggataattacgaccatgaagcatgggtaggtgtctagagcacgcagctcattctgatactaaaatggtctaatattgtaattatcccatcaactgaggtagtgttatttaagcagggctaagcatatagttctagataggtcacataagtaacatgaactagtttatttattacacaaggttgacaaatgtcacgaccggaaataacccaacgggcgttccttacgtgtgtgtattattccttgtctcaggaggcaaggtacaccaaaagttgatacatttcagagtttatcaagcggaaacgtaaatagttattttattacatgggcggcgaaggcccagcacacacaaagacaaacgggaaacagcgtaagactagggagacgaccacaggcgcttgacggcaggcatgagctagacaccaaagccttcatcattcaggggctcctcttctgggtttgggaaaaattgagcaagttgagtacaaccaccgtactcaacaagacacacccacaagtgcagaataaatgcaagggagtacaagggagccataatataggggggttagggtttgcagtaaacagcactaaaagacacttagttgctcaaagctattttgtaaacacggtcctagagctatacaagattattaatcaaggccgtgaactcacacgaacctgccttaacccaaggcctacgatgattcagaccgaactggcaacccgaccctgggtcccagctcgtcccaagccaacccaggccaaccattccacattttagttgttaagcaggtgttaagaattaaaaacactaacttgggtacattgctcggcttgcccataaccgagggcgcggccacataccaccacggtatccggacggaagacatgacatagtttccaacccatcctagccataaacaagagtaccaacccaaccccaccaacaattaaaatgtgcaaagttaaaagccaaataaggcttagaggatttttgtaaatttcctaaaagcttaaaatgcgtaaataaattttagtggaattttcagagcacaaataataattattaagaaataaacaaagttgaaaaggttttaaaaaagaaaaaccctaaaaatccctcttccctctcttgggccgaatccggcccatctccctccccctttctcctctcccccgcggcccatccagcctcttcctgcgcgcgcgccgctgacgggcgggcccgcccaccaccctcgctgacgggtggggcccacccgtcatccccttcctcccgccgctcccgcctctccgcccgcgccaagcgccgtctccgccgccgccgccgaatccgccgcatcccgtcctccccgcgtgcaatcaataagggggaattattccccgtgattccctctccctttcccccca

SEQ ID NO: 50493 - DNA, 680 bp, Oryza sativa
ctttgccgccgcccgggcaagctcggccaccgctccatttcccctctccacctccgtagcgccgtaccacgcgaaccacctctctccaccgccgccgccgactccagccgcgtcgcgccaccgcttcagtcgacgccgacccgtgccgttgcctccctcagctccgcaaggatgaggaggacctcggctgctgcccctcttcgccggaaatccgccggagctccttcttcctcggtcgccggtgagatccttctcatattgtcgcggtcggccgtcgttaccggtcaccacgcaccagtcctcccctctttaacccctcctttatctccctcagatcgaggctgagcccgtccgccccatcccgagcgacgcccgtcgccggagctccgtcgcgtcgtcttcctgaggagccccgccgccaccgttccttgccgtcggccgccccttcgccgtcgtgcctctcggtgagcactcccctccctctcccttttcctccccttcgtcggccgcctcccgggcgtcctcgcgacgcgctgccgccgccggtggccgtccgaccgggtcgctgcccggcgcgccttccgccgctctccgtgccagcgccgttgcggtggtgccgggcaccggttgctgcctcccccttgccgcgccgggccgctgctctctcgcgtgcgccgctt

SEQ ID NO: 50494 - DNA, 1538 bp, Oryza sativa
gaagggcctttgtgggcttgggattacagtcacgtgcggcccataggccttaactgactgacagcgattctcttgcggcccatgtaatatggcccgaacaggatcgcgactgattgcaggccagacagtccagcccagcccaggacactttacggctgttttccgtgacgacagctgcattttgtctccatccatggctactccatcctgcctagcttgaatgctggaccgatcaggtgaggggaggaaccagttgaaggccagtggcttggcgttggcgttggcattggcattggcattggcaactactgactgcatcaacactctaccaagaaacagctttgccatgggcatgtttggtgcacctatttgggttgacgcccatagggtgttcgacgaaatgcctctgcgacaggagcctttgcgcgtccagattcagtgtatgggattccgccggcaatcaagttatgtgtgtgctagattgctaatactctctacttgcatcagcaactgactctagctgtagttgtacaaaaatctcaaactgcagagtggggactgcgcttattctgggagaagcagcagaacggccggtgcacagatactgatgtgatctgtgcctgcagcgatgttcagagaactagacagctccgattaacagcattgcttggacagaatcttaggtcagcccctttcttttcgtttaaacactttaatcaaccagaggcctgtgattttctttgtttggtctatgctcattgttaaaagatataaggagttgggttgtcttcaatcacacatatcgattcaggcaatgagccaattttgtgatctcgacagaatatggtattcaggaaaataggaataaaattgttcattgccactggatggtgttacaacttacaacaacgtttagttctggatattttgttttttcttctggggtcctttatatgcaattcttttttttttgtgtgtgtgcttttaaagcgtagtacctaatatacttgccataaaaaatgatctctatctttttaaaaaatagtgggctggctggttcagaaacaaaaacacatgaattgttttaagtaaaattttcaactaaaaagttgtctcgctgctagccttacacttaatttaaggatcttatattgttaggcactgttcttggtacaattgcatagcaatgatatcatttaggcataattaccatgaaaggaggtttgaccattaggaaaacaaaatatttcattcatacatgtttgcatccacaagtaactgaagcaactctgtcctctctctgaacatgctgagaggagagagagagagagtaaatattaaaacatcttaatagctaatagtagtgttttaataaataagtaagataatcaaagcttcaccagcctttccatctaggatgtgcacaaccattattttcgctatcaatagtgtacatggaagcaagataattattctgttgaaataccactgatctggtccaatttgaattcttgcacgtcacccaaaatactttcaag

SEQ ID NO: 50495 - DNA, 933 bp, Oryza sativa
tcatgaggggtcatcgccttctctgaagagaatctcagattccttcaaaggtgaggacttggtctggcaagctattcttctgcaaactttttgagtttttatactgtttgtaactttgtttccatccactaaggaagctcaaactggttaggcataggacaagcatacttagctgtaagcacatccaccaatcatagtgacaggcaaccagtagccaatgcaccaagcatagcttgtggtcctttcagatcggaaggatcacagtaaattgacagttgcagatacacatgtgagtgtttgcttgtgccaaactgttagagagtacaattccttagctgcctgctgttgttcatgtctacagtctgcacctaacatctacaaggaaccccacatgttgcacttgccacgaaggaacatgatagtatgttggttaatgtgcagacatacttatgtagatgagcccaccaattattttgatttttatagatgagacagaatgtcagatagacaagaattatcaacttatcttttctttctttttttcacttgttcagacggcgagacgcatacttcagatgagagttggaacccaacaagcctccctgatacaccaccttcaaaggcaagcaacgatggcaaccagataaaggcagaaaacatgaaagccctcatccaaaagcttgagctcttgcaaatgttgagtgaggaagctctgaaaaccgatgacactttttcatcagttgctgccaataaagatcaccagtacctctacgagatactttcagcatcagggatcctacacaacaaactaaattttcaaatgatgcctcatcagctgcgaccatcaagctacccgattaatccagagcttttcctcatccttgaacaagcaaaaccagacgaagaaaagctgcaccgtaggctcatatttga

SEQ ID NO: 50496 - DNA, 825 bp, Oryza sativa
ccgaaaacatccagaacgatgttttggtgctggaaattttcggacttatccgaaaaatttttggaatgtctgaaaaatctttcgttgactttgctattggtgctgagctggaatttttggacttgtccgaaaatctttcgtaatatccgaaaatctcaattattgtgcataacgggcagaatttgggctgtggctataaatagccccctcccctcacttgtgagcgcggctggttccattccaatcatttgtgcccttggcttgctctctctctagcacttttgaaccttgctttcttgtttcccctctcacccgtgtttgatttggatttggtgtgtgtgtgagagttgtggattcgagtttgtgtgagtgcttgttgttgactttgtaaagatttgtgagcacttgcatcatctccgggagttctttgcttcatttgttactcttggaggttgaggactcctaggcggctaggtgtcactcccgagccactgatctacttgtggttggccgggagaagtttgtgaaggtcggatctcacctccgaaagggaagagatacccttagtagaaggagtgcttagtgcaacctcttgaggaaagggttagctaagacccggctcttagtgagctcctcaacggagagtagaatcccctcaaggattcgaacttcgggaacaacttcgtgagcttcatctttggtgactttacttcctctctctccactagctttgcttgtttgagccgctataggtctagtggctgtttgtgctagcatattcttgttgtacgcaactagatctaggatttactttgctatttgtgc

SEQ ID NO: 50497 - DNA, 2109 bp, Oryza sativa
  unsure (1)..(2109): unsure at all n locations
taatagaatttaagggataaaagtattctccccggcaacctaatttaacttttaaaagaggtggacataaaagaaacttccaaataaatccattctcttttcgcactccagtgtatggccccttcttctcctgacgtgcacgaccttaatggttgggagctgaaatctcgctcttcacaagtagggataaatattttcggaagtttgtttagggctaatgttgaagactatttttttttcttaaacaaaaacctaaaaatttaatgatttggagtagtatagctgatctcacgagtatatttcccaaacttaggggcctgtttggatgcccacctcactttgccacaattttgtgtcaaaggtgtggcaaaatgtacattgtggctctataattgatgaccacacttgtggcaagctttgattaagaaaaaggtctataactagtgggatcaaaagagatctaagaaagtgcggcatgctaaaattgtagaatcaaaccaatcctagctatatttgatcatattaacctactgcaagtgtagcaacatgtggcaccaaccaaacatgccttaaatcccagtcggacgtacgtgaaaatctaaccgcccgccccacctcatggcatgattgaggagatcaaccaccggatcggtggccccactgtcttagctaaaccatagccccacgcattagtgggtgagagatgattaccgcctttgggtaaaggaaagccagtcatagtattaaaccctgagtgccatattagctcattcatagtgtgtcctactcatttgaggagcttcggagtgccacgtaggtttaggttacagaattcctaaaaaatccttgnagttcttcnaatatttctttcacaatgcacctaggtggcattcagccccaacatgccaactaggagatcctttccacgtctgtatctgtcatgccccaagtatgctcctcgtgcaaagcaagcgagaatgggccagacgagcccccagtcaaagccactcgcattgtaagaatagtttcttatacgttcttcagcttatgtggcacatagctttttcgtgagtctcctcatagatggtagcaacactgctctttccctgcaaagtggctttagaagtggcttcaattttatagcttatcccctattatttttgtagttctcattttatttttcaatttatgtggaggtccaaaatttacaccgaacaccctaaaatctagaaaaaaattataatacccccctctcctttctcccttatcctttccctacttcggcctcctccttcggctaccctgccgcatccctctctccttaccacccactatcggcacccctctcccccttcaccactttccctccccccaaccgttgcccgttggtgtggctctccctccaccttcctcgtcggggcgccgtcggaaattgagcgacagaatggcggatcgaagcgacaacgagctcggcaccacgtgcgtgcgtggatggcaaggagctcgagacggatctagcaatgttggcgtgtccgtctcgtcggcgcgaccgggcagagaggcggccaaagcagcgactgtgtcgccaagcggattgacggcggggcttgctggatccagcctcaggcggcagtggcggcttgctggatctcccctctctcccatgggatgagctcgacgatgacacggaggctaggaaaaacgacaatgtgctcactcactcatgcacgcgggagcgggagggcgagggcgagcgcggtaggacgatgaaatgaggtcacgacctccacaacacaccgcttttcgcccctggattagaccgaggaacgagtgaccaaagttggacgcttggacttcagctcggtttggtagaagctaaaggctgtgtttagattcaaaatttttttcttcaaacttccaacttttccgtcacgtcaaatgtttggacacatgtatggagcattaaatgtggacagaaaaaaaccaattgcaccgtttgcatgtaaaatcgcaagacgaatcttttgcctaattacgccatgatttgacaatgtgatgctacagtaaacatttactaatgatggattaattaggcttaataaattcatc

SEQ ID NO: 50498 - DNA, 731 bp, Oryza sativa
tttgatttatcaggccgagcgataatgctctttgttgttccacgtgaactagggccaaagaaaccacacaagtaaattagcagtgttctcagactatttgtttcaattaccgtgcccaattattccaatccataaattgcatgggtaagttaattcatattgttttgagactttggtctggtctgtcccttccaacacttacacagcttcgttgtttcgcttattcacttatccgaattacttattaacaaataaaaaattatttgtgagtaaaacttttatatacatgtccttaagaactcaaaagtaaatgttgtaaaagaaaatatgatagaaaaattttaaaaataaattcaaaattgagttctaaaatttaaattttggtttataagaataagcataagggaaacttaattatgagaccctagttgttatcaataaaatgttttgaaatgagatgaaaggcataagggaaactatgagaccctagttgttgtcgataaaatgttttgaaatgatatagaagtagccgaaatacagaagaaataaggccgtgtttagattcaaaattttttcgtcaaactttcaattatttcgtcacatcaaatatttggacatatacatggagcattgaatgtggacgaaaaaaaactaattacacagtttgcatttaaattacgagacgaatcttttgagcttaattacgcaatgatttgacaatgtgatgctac

SEQ ID NO: 50499 - DNA, 758 bp, Oryza sativa
tgaaaatgcccctcaccaataacgatcactctgttaatccacatttaatctcaaccactgatgcgctttaactttcgtgctagttttttttctggacgagcatagaagcacgccatcctccaaactgaccactcggccatcaccagggactacacgagtaacaattcctcaccgacattcattttgtcataaaagtctggttactgaatctgctcccgtgcgcaggcgatccaggaggcgatcgcgatcccactctcgatttaggccgccatcgccggcgatcttgattagcaacaccggcgacaactccgatcacagtgcccacaccccgttttccgacctttgtcggcgacggccaccgcatatcgtcggttagccatttctggcgccaccaaacacaatttctcactaggggtagcgccgctaggaaccctagagtgggatcggttttggtgtgctagcctccaatcggtacgctgcatatcctatttccctccgatctgtggccatggccgcaatcgggagtggaccaccggtttatgccgaaagtgcacgttgcagatcagcttcagaacctcaacctgactacagaagaagaaaacgttgcggaattcagcgatgatgatgagactggagacccccaggaggttgaatggatgcttgttggcaaggtcctctcgccagcaatagtgcatgccaccacagtattccgggcgatgaaaccggcacgggggaatccctacggattgaagatcaga

SEQ ID NO: 50500 - DNA, 1187 bp, Oryza sativa
gttttcgtttgcagaggtacttgcttgggcgaaggaaaagagaccgagcgtaactaatgcatggatgattaaagaagttgattggggaccaaaccaagaccttttccaagtcttccttcatctcaccacgtcacttttggtccatagaagacaagagataaagttctacacgttttggattcggattcgggcctcctaacagcatcaacttcaaatggacctagccgctgatctagaaggtattttggggcttatgagtacttgttggaaagcttatggagtctaccttcatatggttttggtcccacgttaaaattcctaccgagctgccgggaatctgcaaaacaagccacgtatctcatccagtccgaatctgatttgggttttgggccttgtaattgtgtcgtgggcttagcccaagggggtgtgcgccctagggcaaccctaggacgtccctaatcacatttatttagtagccgtcatcgtttagagttgggttttgattagattattctgtcaagaacagtttcacccctagatcggtttgtggaaccccaaattcgagtgcataatcattcatatgcaatttggttgcaatctatcttgttcttgcttgtgttcttcgattcgcatgcagggattagccttcttggtgaggtcaaccgggtttcggcatggttgataaccagaggagacgtggtgctgcaattgcggggctcagtagcttgttcgttcagaagctggattgagttgtgtcgcgattccgctcaaatcaattgtttatctatacctatcgaaagatcgggacctaactccctcataagttggtatcagagcgcggttgcccgttaggtaatttatcttcccataaccagaaaattgccacacaaaaaatttattctttacctagacaatttgagccgttgcattgttctattagattttgctttgttgaattctaggttgcatcgtcatgtcgagtgctggtttagttttagatttaatttttagttttgagtattgcatctgttcatcacttaggtctagggctcatcactcaagtgtgtgagttgtacgtcagttttgggtccagtttttcatctcgtcagttgttgctgggaccttgaaaaattgaatcgtcttgtcgtcgggtttccgtttttgtgatttagagaaatttttatcaa

SEQ ID NO: 50501 - DNA, 791 bp, Oryza sativa
tcacgttagcagcaatccactacaccaccaccatgaactgtttgttttagctgcggtcagaacggccgggccatgctcaatgttcagacttctacggcctcagctgatcaccaccaaacgatgtggatgctctgcatgcccccacaggcaaccacccgaagatttgttactccgggttttgccgctccatgtggcactgacatgtgggtccttaaaggtgttacatgtgggtccttaaaggtattacaggtagtcggtggtagcgagacggtctgtttgattaggatgatggtggaaaagaaaaaaaagggatagatttgcttgaacgatgatgatagggtgtgtatgcctgggccctcgcatgtttgcggatgcaggagcatgcaaatggaaggttggcactatttttcggatgagttgtaagcgctgtacttgagcaatttgatgggtgagctgtgttagactgttaggcatctggtttttgcaaaaggacaacttgatcaacgtgctgtttgctgttcggtcatctgttgcaagagcaatttgatcagtgtaggccacgaggttaattcattctgcaattaatctctctctgtatggaaccactgttcagtcatctgtttactgtagatccccgtactactcactcattgtggcaccgcgtttgccacctcaatttgaggcgccatgtgtaatgtagctaagcctaattatacagctgggtccttgactcaatttgtaaatggctgccaaacaatcctatctctcagctggtttatcagatgaggtcc

SEQ ID NO: 50502 - DNA, 629 bp, Oryza sativa
ctgcagccccatggtggtcaactggcaataatcttcagtttttttttatgtaaaaacactatagaaaagattcctacagtgtatatattataaatattaacaaaaccatacagaaaccaaaacttcaggtaacattatggtagttcaggttttttgggcgatttgcagcaaggagtgaaaataattgatctttatttaggtatgttcttgctggcgcttaatgctttttcgcaagctcacgatgtttgggtcactaatattctttgatatgcatatttggatttgacatgcaaatttttatgcatatattttgattcggaagttatttttaattttccttaaataccatattatcgtattttgtctttaatatatttatatatgaccataatcgaattaaatcatttcactaagtgtaattttaaattgatatattatttcccgttgcaacgcacgggcacccaactagtaattaatatgtgtggacgattgcatcgatcacatgacggaattaagcgtgcgcatggagattagctgtctagctctcgatcgtgtcgtgcttatagccatgtctcatatggtctggaaaaacaaatgattggacaatatcatgcactacttgcatcggg

SEQ ID NO: 50503 - DNA, 634 bp, Oryza sativa
gcacattatcaatgaaatagaccctctaccagcctctctggctttactcctgatattgaggaacttttattatttttttatgggtagtataaagcttgctcttgctaggttgtggttattaaacaaaatttagaagcttcacatctgatacatgctgacatcccttactggatcattttgacatgattgctatgagaatatggccgagtttagttccaaactttttattcaaacttccaacttttttatcacatcaaaactttcctacacataaacttccaacttttccgtcatatcattccaatttcaatcaaacttccaatttcggcgtgaactaaacacaccctgtgtgttggaattcttttcaggctgttttccatatagccaagtaaaactcgtaggcaatgtaatggtagtaacaagtaatgtattcctcacagtgatatttcaccatgctatcattctttacgagcatcttgtgaatggtttcaggaacagagcaaatggattgcagttaagaaatgcttatcgatattcaacatttcttaggtcagctggtcagaggctgggtcactttttggcattattgagcagaagatgttctcgcaattttcccctttactgtactgaactt

SEQ ID NO: 50504 - DNA, 762 bp, Oryza sativa
gtgttttatccaatcaaaattatttatattttgggatagaaatcagttaaaatcatttatatttatattgagatagagagagtaagtggtgtttttttaaaaaaaaaacacttggggctcagaagtgagtgcaggctagtcatggtactccttttatttcataaaaaataatcattttatttcataaaaaataatcttgatatgatgtgacattttctactaagtctgactagaagttatctagatttataatactataatatatcacattatatttagatttaattttaatgaaacgagtcagcctcgtttggtaaactctagctctcatctccaacttatctgaagctgatcctctgtttttgggagtggagttagcagagctattcctttaaaaaaaatacaaaggtgaaactgaatttttttaacatatttacataaaaatgccacttaaccatcccaagacaactccttacccctctctctcgcgcgcgactggcgggcaggcagtgcgtggctgatggcgcgtgcggggacggcgtatggccgacgcggggtaggtgaggacagcgcgtggcctgccgctggcgacgcacacgggacagcaacctagggcttcacgaggtattatggattgttttttttccatttttttttccgaatactaggcaaacactttttagttggtctcccacataagagtttagagttaggatttggaatttaaagcccaaccaaacgaagcgagtagacatgtagcag

SEQ ID NO: 50505 - DNA, 1084 bp, Oryza sativa
atgtggggtttcttagtacaacgaatctgaactattatgttggtttttttttacggagggagtatgttgtttggttaaataaaaatgatattgctttttagaaaagacgaaaaaaaactgcatgtctaaccctataaatggctgattttcatgtgttatttggatgagtacgtttttagtctttgctcaaaatgaggcatgacaatcagtcattgttacgtcaagtctcacttgttggagcagacaacaatagaggtgttcttcaatggtgatggacagagacgtggcaaccggatttgcgaaagttgtttctctttcatatcgaacttttgccaaacttgtttgtgtggtacggtagttctactgtaatagtgttgatcgctgtgtataccatggtcagaatgttttgaaagaaatacgaagaagggtttttttaatcattatatatcctgtaattatcatggaaaacatttcgttttaatttggaacggggggtgaaatagctgagtggactaaatagacagaaactcagaatgtgatagatagatgcatgcatgcatgtatgcgttcgtggaattccatcgatttctggcagcaaatcaaagatgcctgcatgcgaacggcaaggtgcagatgaagtgatgtagaagtagctagctagtcaacgaggactagctatagctagcgctagttagaccattaattcacaatgctcccatgtggcttccacccctaagggccacccccggagaccggaaatatttcggggtggccattttccctcccaccagcagagcttttccaagactgggtagctctttgccatcggttcctcatcagtttttcaggaagagagaaagagagaagaggagagggatgcgtcgtcgtccccatgctccacgccgccgcggggaggaggacgaccggacgccgtcctcgccggagaagctcgccggctcaatagggggaaagcgacggcggcggtgaagatcgatttggcatcggcgaactcagagagagaaagaggggaaattcggcgagttgtcactccgcccggctccgcgaggaccaccgacggttgggg

SEQ ID NO: 50506 - DNA, 776 bp, Oryza sativa
gctaacgtgacgagctgacttcgatcatccagactgagtcagagaccgagacccacatagcatacatacaaaatattctacattagaccagttcttcctctaccacctttcctccatctctcttctctctcctcagctcacgattttagcgagcaagctatgccgatgatcattacagaggcctgacgaggaagcacataatatgctgcaggaggtacacagcctcgctaagctataacggcgagtcggcgattaaaaaaaaaaagtgttccagtgtacaattaattcgttctatatagattcatttttcaagtgaaaaagagccttttgtaactctttatgtaacaccttgactaccattaatacaatagttataaggtagagtctctctacctttttcagtcaaaaaaaaaagtgaaaaagagacatatcagcgtttttacaacagcagctatatttgttacagctccttgcgtacaacactttgattgatggattgcacaaggaaaaaagataaggcattgtttagatcaaaaaaaatttagccaaaaacatcatatcaaatgtttggtcacatgtatggggcattaaatgtggaaaaaaacaattgcacagtttgcatgtaaattgcgagacaaatcttttgaacctagttgtgccatgatttgacaatgtgatgctacagtaaatatttactaataacggattaattaggcttaataaattcgtctcacagtttacaggcggaatctgtaatttgttttgttattagtcta

SEQ ID NO: 50507 - DNA, 716 bp, Oryza sativa
ttcatctcatctctctatattgtttatatcgggttattatccattaccaaagagagaaaagattgaaagatcttggattaaacaatttgtgtaattgttgctttggtgatagatgataaaccaatgtttatgggattaacctctcttttacataagttgtcaactaggttatttcctgataatgaaatgtggtagatatgtattcttttgtgatggaccttaatcatgataaggatgaaatgcatggagatagagcgatatgtatcacttcttatctcctactttttgataggttcatatatatcatttccatgttattgttatataagtgtgagactaatgtttacttgagtcttatcttatttagtctcctttacattgagacatggacatcatgaaggtatgtttttttgtttactttatcattgctacatgccttcttcatgtgtataggatagaccccattggttcttctttaattatacatacacttgtctctcttgtatagttatttgtatgcatatatttagggcgagcaaatcctatacatttattgcacatgttctagatccatgttcacctattatttatattgaatctttgcacttgagcttatgcacgagtatatgacacttgtggtgttaatgaatactcaacgaacatattcatatatttcatatgcaacccgggtggtcatcaagtggaggatgacaacc

SEQ ID NO: 50508 - DNA, 533 bp, Oryza sativa
catggagcattaaatatagattaaagaaaaactaattgcagaattaggggggaaatcgcgagacgaatcttttgaggctaattagtccatgattagccataagtgttacagtaacccacatgtgctaatgacggattaattaggctcaaaagattcgtctcgtggtttccaggcgagttatgaaattagttttttcattcgtgtccgaaaacctcttccgacatccggtcaaacatccgatatgacacccaaaaattttcttttcgcgaactaaacagacccttacttgatgttttagagttcaaaacaatttagtgctaacaaaagtatgtatggttcccaagttctcccgcaatatttgaagaaatggttataaaggaattattttgttgcttacaggggaagctaaccatcttggaattaagctttgaataatggacgttaacaactattgacccacaagaatatggatatctttcatggttcaaattgaatgtttcaattaatcaattctagccgtatttgatgggtga

SEQ ID NO: 50509 - DNA, 1500 bp, Oryza sativa
  unsure (1)..(1500): unsure at all n locations
gaaagctttttatatgaaagttgctctaaaatatcagattaatccatttttcaagtttgtaataattaaaactcaattaatcacacgttattaccacctcgttggtgtgaaacacttaatctttatctcatcttcaggagattcaaacaccaccatattacctaaaaatcatgtacatggtgatcaaagatgctcttcattacacatcaaacacgcagctaaataggggcgaatctttattatttatagcgagcgtgagtggttacggtatgcaattcctttcatcagcacagtgtgagcatcacgcgtccccgtcccgtcggcgcaccagcacagccacaggttggcccagagagggtgcttcaactgtcggcgcttgcacatctggaccgtccatcgcggcgatcggacggccacccgtcccgcaaccccgccccgcgtcgcctatacaagacgtcccacccccccccccccgtacgctcctcccccatttcgaacggatccgggcgcagggtgcgagtgcgtgaggcccaatccccaaatcccccccccccctcgccgccgccgccgcccgtctgcacgcaggcctcctcgtcggtgaggtccccccgctgatccgtctccctcccccccttcctgttgatccctgcgctgtggagtggcccggatcctcctgcgagatcccgtcgcccccactttctttgtttttttattttttacttnnttctcgggtgttcggcgcgggcaatgctggatcggtggcggatttcgctcgccgtaggtagcgcacggcgtgatccgttcgtctgtagggtcgtttccgcccaccgtgcttttgggcggttgtttgtgctgcgtctgtgcgttcctggtaggtaggaattgcgtggagagcattagcgaggagtggaatgtatgttcgagattcggctgcggaagctaactttgtgggacgatttctgatgggtccttgtatggtctgtggctgtgtgatgtgtagaattgtggattttgttttaggcctttggaagaggatgccacgatctgttttgtttagtttttcggtccgattggactggatttcctgaatcattctgtgctgatctcatccctttgatgaaacatagtgatgtacgtcagtatttgcaacggtgtggtcgttcagatgagcctgatcttgcagttagatttgaatatctagtaagcgtgacatgaacgtcttaataaacgtcacatgagcgtcacctactgttttctagcggcatagacgcctagtggagacggaagatctttctttattggttatcttgttgttttgcacaaattacttggtagtgatgttgctgtctgtgtacttatagacaatagaaagttgctttcaaatgtaatacttcacaatgttgagcagtaaacgcaccagagcgtaaaggttcttgtgttgtttatacttcatgaatagcaaactaccatctaggtgcttatagccaccttttatgcttg

SEQ ID NO: 50510 - DNA, 665 bp, Oryza sativa
tctttatagacttctctcagcctacccatataatagttagctttttataattaatacgtagcccacttgtctgtctcacggagtttttttggttcttgtgtccaagccggctgtaagtttacagcccgcttctcctctctctcctctcttctctcctccacctcagcatttagctggcttataaccttctattatacttgctctaagggacctaagatgaacttattcctttatttgattcgtcgattttactttagctggagcaggatggcttgatgtgggccagacgaaactggcataggaatggtcgacaggccgagaacccagctcagtattcgcatcgccatccttcggaggattcttcggcggagttattttagtactcccaacacgggtgcggcctaccatggacgacctcgccgtcgtcagcttcgccgggggcctggagcccagccagaagccgccgacctccatgagtttcagttgccctgttcgtccatatacaggtcttgctcgcttgaatcctaccacgcttttctttctctctttggcttcagtttcagttggtgcgctactgaaatgctctggcgaaatgcgtattgagatgaatgcaaacgttccatggattaaggtggaaaaactgccaagaaatccaactgggttca

SEQ ID NO: 50511 - DNA, 3101 bp, Oryza sativa
tcgctttcttttttctgctcggcggtttattcttgcatggattgctcattgcaaacgtgcatctactcctctgcttctaattgtgtttgccctgcgtgtagatgtagtccagatgagccacgagcaaacgctccactaggcaatcatcttcttcgcaaccttccactctaccatcgtagtttcccctctccacaacctgtgccacgatacccacaacatgatggtaaaaaatcggttaaagatacgttcaattaatcaaattacactacttcgtacatgcaaatttatcaaaggaaaacatgtcgtgatgcaacatgatatcaaatgtacaactgaaactaaatttaaaagaaagaaaaacagtttttttccttcaccttactggaagctttgctgggttcaattggcccaattctaccaccatggcttatgctgatgggaaggagaagtgctacaaggcaaatggctatgaccttcggtgacatggcgtgttatgtttgtgtaggactagtatcgaataggtcatggaacctgcatacacaatggtgtcattcagacgctttatataggactcaaagcaggggagaaacggtgtcaatcgtatcaattcttttacaaggatttttgtttcaaaccgatttgagaaaaggaatatactgtagacaagtatgggtatagttatgctgctgcggtggcaagtaagagtacagttgataggtttcctgaaaaaaaaaattgccacaaagaaaacatacaggagtatattcgttagttatggacgtgcgcattcagacaattgacaagtgacgatgcttctcgtcgtttattataccggttcatccacgaagaaaaagaaaattaatatatgctcttagctatttacaaattaatattgaagaataaactacgataaaaaatcttaaaattatcttgaaaataagttccaaactattttttttcggctgataagtcaataagcaaatgataaaactgtgtatatggactccacttgtctataaatataagtattccaggcatttagaacttgttcacaaatggattcgtgcgttgcatcaatcatcttagattcatttttttaatttactctatttgtttcaaaataaattaactattggatattttcatatttgtaaccataaattgctttccaatcttactcatttgttgcttcatcaatgggaagtatctaaaaaaactgtcgcattttctttaggaaacactttcaaatataaatatattataactatattgtaactacgatataacttacgtaaaacttgtattttcaactatggtttgtttggctagtgccgggatcttacgcatgacatgtaaaattttctttatagcaattttttctcttcatgcagaaatctcaagatgatcgagaacgaccacaaatctataagttttggaggaaaaaactagcgaaggttttctagcgattccggtgtcaatataattgcagtcctcgatcgttacctagatagtcttgtgcatgtgagtatccgatcaagatcattcataatgttctcaaaaagaagagagagaaacctttcggaaacgaaactgaagtgtctctttcattttaagttttgcaatccttcattaagtagcactaagatactaatcacttactcacttatcactttcattttaagttttacaatccttcgttaagtttgcaatcttattaattaccaccttatttttaaagtgtacaacgttattaatttttctcataaggtttaatattcttcttattaaaagatttagtataaatatataaaattataaattaagattatattttatttgataataaaacaagtcgtaacaaaataaataatattatactacttttaaataaaacaaatagtcaaacgttacatgaagagttaacgatgtagtagcttaatttaccagtcctatttagagcaggtactcagattataagctagctagctataaatatattttatagaaataaaagagaagagagaagagcaacagtctatctgtagccagctgcagtacggactttaatacgtaatgtatatatgacatgtggaactaggtattaataatacagtaagcaattattatatgaattaagagtattaaattagctataaatattttagagctagtggttggttataatataatattaaacttgctctaagctggggccggtcactatctgtgtccatgcgcagacgaggatcgcgtcgctttccccgcgatgattacccccggcccgatcgagaagaagacacagatgatcgagtgggtgaccaaggacgacggcaagtcgatccaacagatgagtaggtcgttctttaattgactcccattgcctacaacctggggaaaccaaactctggttttcccaggttaaaagccccaaacgagagcggctagccacagtaacacgataacgtacataacaattccagctgcgcgcggtgtatggcggcgccggcccgactccgccggtgcacagcccccaccaccagcctaatttgttccaacgcgcgcgcgcgcgacagagagatcagcgaagctgagcatgcagtgccctagtggccgcgtcgtacgtacgcatctctaccttaaaacatacgtgtctttatcactaccacgtgagctcgataaatactcatacatccacccgtcaatgataaatgtatggtgcttttaaagataaaggatctgaatcagagtgtgtttagttcacatcaaaattagaagtttagttgaaatcagaacgatgtgatgaaaaggttaaaattttacgtgtgtatgaaagttatgatgtaatggaaaagttgaaagtttgttgaaaaaatttgcaactaaatacagtctcagtcgtacgtcgagccgcccgcaggagccaaaccacctaaaaatcccacagccatcaacgtactcgatcgatacagatatagatggatggatggatggatcgaccgcgcgcgcgggcaacgacggcactgatcgatcaccttaatttggttgcaggttgcgacgtcgacacgggtgcgcgtcgcggggccgggggggggggggggggg

SEQ ID NO: 50512 - DNA, 916 bp, Oryza sativa
acactggcgccatgcccgtgccaccgtggcactagggctgtcatggaggtgctgactgggcagaatgggggtgccagccacactggcgccgcccctcctagcatggcgccagcatggctggcgcgcccctcctctgtgggccgaccccttaaaccccgtgggccccaccacctatctactccccactcccattttcgcccgagcaccagcccgagctgagcagcagcagctctccccctctctctccccctcacctccccacctcaaatccactccatttgaactcgtttttcgcgggattttttgtggaaatcgaagagaaaggtagactccttcattcacccctcttttttttcgcttttattggttgaatttgtagatcggtgggtaatcctagaaccccttttttacccaaatttgtgatttttagcatttgttcttaggattggcttgttgtagtgctacatgtttgcaatgtactcattggtgtcacgatttttttaaccatatatgtggtaatgttaatttttggatggtttggttggatggatggatgaaaaattatagttgaggcatgaaagtaattttaatttgatggacttgatgctatagtctataggttaaacttttaaccattaattatatgaaggtgagcaaattttggttgcattatataaattgattatagttaactagaactaggttgggttgtatgacggagtatttgtaatatttcgatgtgtaatgcactagtaaacttgttgatagttgtaggtggattaaatatttttttggagtagtagctttgggacaatttaagttatgcattggttataatatgtcggtttggactacgtttaggaatgcaagatttaatttttgttgcaaagttacatttgattttttggggctgcag

SEQ ID NO: 50513 - DNA, 2053 bp, Oryza sativa
gcgacggttctctctgtctggttgcacgctactctgagtattccaacaccgtgctagatttggcgagatgagtaatacggtgctgcacggaagcttgaagccgctccgaccggcggcgacggcatcaagcaagagtagcattgtatgcggccaaaaaaggtcgtctccatgtgcctctccactgccaaagccatacaggattcatgtgtatctgagtcccttgctgtcgttgccgccgttatgaagtcgttctcatatgtgacggtgaccagtgggcagcggcacagacaatgtttcagatggctgcctgcttgcctcttaccaccactcctttccttttttgtcatgctttctctttctccctttgtatgtgtgttgcagccttgcaggttctcactatcatgtatttctgaatttgtgcaggttcttagcaaataactcagatttccttgagcatatcatttcaggataaaaagcataaaggttggctttctgttttgtttcaacctctgttactgatgtactgcattctttagatttggtctttgtgaatctttagttaccgagattcatacgtttgtttgcttcattcttttaggtggtcgaccatctatagttgctttgcctctcacacgagccacgaatgaagctccacagcttagcgcaattgtataccagtagatgatgctggttttgtttgccatcagtcatcttgattaccttggtgcacatgatatcatctgtttatttgaaagaaaactaaatttcgattcggtgactactttacagatgaacactcgacatgaatgtgtttacgcacaaaaagtatttggcaatgcgccaatgtgttttcctgcagtttagattggctaacagtagatactgctggttttgtttgccattagacctcttgattaccttggtgcacacagatataatctgtttagatataatctgtttatttaaaaggaaactgaatcttgatttggtggttagtgaacagttgaacactcaacatgaatgtttatgcataaaaagtattatgtcctttgtagattcttatggttagccagaggctataattagaagacgatgtctttgggaaggtaggtagggctgttcagccccaaacaattgttgatcagctatactgatccctttttcatgttgcaaaaccttttatcctatgccttcttttgctcaattggcctaacaaccaagggataaatagaaattgccacaggatcttcttacaacgatggaaagttcatttgtaataatcattttactacctcaataggaaaaacaaaacatagagcgagcttttatagcctgaggctgtgtttagttcagcgcaaagtttggattttggttgaaattggagatgatgtgactgaaaagttgtgtgtgtatgacaggttgatgtgatggaaaaggactgcagtttggatccaaactttggatctaaacacagcctaaatgtgaaactaattctgtgagtagatgaggttctgtgataattttcttgagcataagtgcacgttttgatgttctctatctgcattttcttgtatgctttccccttttgtgcagataaataactggcaagatattggaatgcctaagaatggtacaaaactaagagcaagaactttcggtgccaatacaacactgccagcctttggtcatgaaaacattagagaatcaacttagacatcaccatgtacgttgttattagtaccatcaacatcctaattaactcatcttaattagctggcactacaatactatatttttctgagatatgttatctctgttctacagaatttaattattgttgtatagtgactgctttcatttgttgcagatcttacaggtgggcttaaagtatataataaacaaagtggaacaagtcatgaatgtcatgcctaattgttgttgttttaaccaggcaacaaactcaggaaatcgagatgcacacttcaaatgatctggtagaaatccccaccttaaatcctttatactctacaaaccacaactatctttaatcatt

SEQ ID NO: 50514 - DNA, 522 bp, Oryza sativa
tcttaaagttctttaggtttgatcaaatttatagaaaaagttagcaacatctaccacacgaaattcccccaattagtttcacttaatttaaccttaaattttttttggttccaaatttggtttaaaaaatattactatatttttctataatttggcctgaagtttgacttataaaaaagtcaaacgtgataatatgaacagagggagtataactgttagggctaggcaagacctaatagtattttatcttaaagaaagataatttgactttccaacaaactttattccggctatttgcttggtaattaaagttgctactattgcatcgaaatgcaggtttgccctacactgcctttgatctctcctgcacgaggaacatccataattgacggcgtgctacttgagtacagcttgaaagccaagcgcggtggcggcggcgaccgcgacggcaacgacgtggagctcatcgacggctgcatcgagttcacttcgccgtctaccatgccggtcggcgagaaactg

SEQ ID NO: 50515 - DNA, 508 bp, Oryza sativa
gttactaccgacctcccaatgacgggtgtaccggttttggtgcccccaaccgtcattctcaagctataataggacctaccctccttcattttaacacacaccaagaaggattcaagaagaaaaagttctcttagtttactcactttgctctagtgctagtaggattagaattagaatagtcttccttagttcttcgagtctccggagaattcgggtatggcccttgtaagactttatccagtaataaaatattcttctttatatagttttggtccttgttggtatttcttaacgacattactagaaatatgaattcccagcaatgacgccagaaatggtcctagtatatatatggttatagaaggaatcggcaagcgcacggatataccattgtagcatttcacctgggagtattccaaggtatcgtatttatttaatgccaagggaacattgtaagagagaactatgctaataatgtatatatgctacttgtatgatcagagtctaa

SEQ ID NO: 50516 - DNA, 591 bp, Oryza sativa
cggttttgtagttaaggcggtttccaggacggttacacctggcttttgagccctctcatccataagcttgcttaggagtgaggttttctccactttctctttattttatttgataaattcctgcaacatattgttctccaagtataagtggaactatattatttgaaaacaaatatgcattgtaagcatagctaattctccattattttagttatattgacggtcaaaatttgtctgtaacgactgtcaacagttacacaaaatcatagggattttggtgcacgacacaaatccacatcattaaccaattttcacgaaaccacatcattaaccaattttacatactcctcaaaattttaaaatgatttagttacatccatgtaaaatttctatgatggattaaaaaaactcataaatttatcaatttaagatgtaattgtagaactcaaaaggatagatcaaagtaaaatgatcaatagtttggttttgtgcaacttagatcacagtacctagggttaagtgagatttacttttaaaagaacacattaagccaccgttggtatttcttaatgtcacagataaaatttgcaa

SEQ ID NO: 50517 - DNA, 4649 bp, Oryza sativa
ggcgccgccagccactctggcatgctccccctagccacctcagcatcgccccgccatgtcggcagggggagggcgccagagtggctggtggcgccgtccaagcctctctggcgccctaaaaaggatcatttctggaataagtttttccatgtgactatttgcgaaataagtttttcaaaaggaccaaaatatgaaaaatccaggtacggatgatatgaccggccaactgtgccgcttctctcagtaacctggtttttgcattgtgaaccaatatgatcatgtatgggctctttttggtactgtagttcatgtgttggtattaccaaaattttggcatctaaatacacagatttttagaatggcaacgaagcgaataggcaaacgttacagatttattttggcaaattgcaaatctaaaaaatcagttattcacgcacttcttatgtttgttgagaaataagaaatatttctccccctttttttccccttctatttgctgctgatcaaggagaaaaaccagcaatgccaggccggagctttcaattgcacgacagtattactgtaaattaaaaaatcagttgcgaacacagttattctatttggtgggaaataaacggtcttatctatacttctttaaaaaaaaaagtagcagtggtgatgtgcggtgagtttgtcacttctatcaccaactccctaccttttcggaaagttaaaaaaaaaagagtatatatatgagatcaattatgaatacccacatcttgcctagagggcagaaccacccagttcaccattcgttcgcttcagtttcctaacatgaaagtatgcaaggaggaagctgatcgatataagaattcacaagaagtacatgatctcatcgatcggatcggaatgggacgcatcaggaagtcgagctgaaccacatcgcaatcacaaggtccaaacagtcaatcatctgcaaagatgaatgctaaattggacggcctgtatgttcagttccggttcccatcccgtgcaaacttgcagttcttgtggccgagcgaggaaggcgtgttctcttcagttcgtccgggcgaagaaacaggcagcagggagggatatgccagcagcaatatatcggagtgaactgtcatctgtggatgcagcatccacaaggtgcttccacaagttccacagcttttccttctcgcgtagtgggggtttggagttagtgagcacttcttttttccaatccctcgagaggacactgctggcgagctgtaccgaccataccagacctcaatccaaattaactcttaagtatgtgacagctcggatcaatatatcaattagaacacctgatacgaacgtcctaacgggtgattgatcgctgggcagaatcggtccccctcccccacatgatttccttgttaacatcattactttcctgttttagtaaatttatacatctaaattttatacacattaagtttacatatctaaagtttatatattaaattttgtacacttaaaaatttatagacctaaaagtttatatatccgatttaaatttgtatttagattcaaatatttttatatagaatatttatatacataaagtttatatgtgggaatttacggtacatatataagtataaagtctatgcacatgaataaaagatattagatttattttctatttttttaatttgttttttttaaagaattatagtgcaataagtagagaataaggggaggagccgtgttaatctagataatctagataataattgctagtatagtatatttacatgtaaagttttaggagttagtgatagcaactttatagcaagataggataatgtcaactactggaccatagcgaatctgcgaaccactggccggtcaattcaatcatctattattgcccatcgagtatgcaacgtttatctgccgcagcttctgcagttctgccggatggccgaagaaagaagttatccaaatattatcgatatagagataaaaaaagggaaatgctgcgcgtcgggcgaccgagcggccgaaaaaaaaaattggacgcctggaaccacgtgttgagtattttaaataactttaaaatgatttttctcctaaactaattatccaatctacgatccgatcatgccgttgtattcgttgaaattaaatctttataacaagaccacacatgattatattttgataaaaaaatattttagcttttttattgatatttttctaaaatgctgcatctggttctttagatgtttcaaccagtagttttacgttgtttcagctagtgtactcgtgatatttcactatatacggatcaaatgttgcagtggattttgatattatagaacgcgtcattgcaacaaatcactcacatattttggaaatcctctattaaggaaatttatttcttttttttgttccatcaaaaatgtttcacctaatgtactcacaatgtttcactatatatagatctaatgttgcaatgaactaaaacattccattgcaacaaaaaacccacatattttagaaaccccctattaagagaattcgtttcattttttgttccacagaaaaatgttgcacctagtgtacttataatgtttcactatgtatcaaatgttgcagtgaactgaaacattctttcgctatttgctgaaacattgtttttatataaggtgaaacaacacccgatttaaacgagtgaaacattttcgatatatttagtgcaacaattccgatatacctggtggaacatcgtgtaacatttaaaaataattcaataattaggtaaaaaaatttcgtcagaatatatcaatgtgtggtcttgttttgaagatttaattgcaacgaatttaatggtgcaatcggatcatgatttagataagtaatttaagagaaaaatcagttaaaaataagtttacacgtaaatcgggcgcaccccctcccgatcgggcgcccgacggggagtcgtgtccagataaaaaggtttcaagaaacattattgtcgctaaaattggttgtgcaatggagcgtacatccaaacaccacgcactataaccacacgaacacagaggacgttgagagtgcagactacaccaaaaatgaccgtcgctatgcgagtccgatcgacgatcgtcaccggttgatttgtccctctcagttgctagtgcgcacgttagttaggagacatgccaattgccaaagttgatgtcccttagccggacggctgctggtttttgcgttcttaagcaatgatcatgtatgcaaattggtatggccaaacttctatgggcatcaaaataatttcatcccgatcttaattttcgctgcaacttattagaaatacttatatttatatagacggatgaagtagccctcactacttaatcctgttgtgcaagtaactaaaatgattaactctacggttcaaaaatttattgtaaaatttagtactatgtatcaagaggtaccaaatttacagtagaaaaggtggtacatcatggtacctcctcaagaaccgtaaaattactcaactaaaataggacaaagtataatagtcctgaatttttcagcccccattttgtgtgcctgctcggccaccgcacacataaatacacgtgcgatgagaactgagtatagctcaagtggcgtgggagcgagggtattcgcgcagcccatctgagttcaaatcctgaacacagcgtgtttctcatagggttccttacaccctcttcctctctatacaaaagaatcaaagatagccagctccttccggttattcccatttttttttctttcaaaaaaactaaatacacgtgtgatagtgatatatatcttgcccagtcacgcccaccgcgtacgtaaatacgtgactgtcgtgtgggattggaggggcaagagctaaaacaagagcgtatatatgatcccttcagtttgctaggagaagagcgtgcgagaggaagccgcgagaatcgtgcaatctcacatcggaataggaagcatcatgaattcgagccgaaacgtgcatcgaatatcctgcacaatcaggtggtatgtacgttctcttctgctccccactccgtgcaaatgttcgaggcgtgttcttttcagttaagaaaagaaaatgaaaacgcaacaggaaagggagacccagcaacaacttgcaggagcaaacctgtctgtcctcccaactctgaggaatgaacatggaagctgtcacgctctgataaatccatcctaaattaaaaatcattctctaaaaggaataataaaattaattaaaattcgaagttaaattggtaaacattaaaatgcgtataagaaaaattttaatgtggcttggagtatttttcttaaattctccatgctctaaattggtccctcaatttttatttgaatattcagagcacaagaaataatttaaatgcaacaaaaaccaagtgcagagttaattaaaaatgaaaagctaaaaataattctctccttctctttgggccattttcggaccaaagtcctcctctccctcagcccgtgggcgaccctctctccctccttcctctcgggccgacctcctcccctcccttgctcggcccaactctctttcctctccctcggacaaagtccattcctagtccccctgc

SEQ ID NO: 50518 - DNA, 1761 bp, Oryza sativa
tcgcttatcatgggtgcaaattgctaggactcataaccttcctgacgagcaactattttctagtggatggatatgtgtgccgccaactgttctatgagaagccaattctcgttatcgaagccatggtcggctagaaatgctctaccttagcggcaaaggcaattgtttccaatgaaggtgactagctgctgagaggaaattgcagatgaaacaacaaaggacaaggggatactcgcaaaggagacatgatgtctatgaccaaatccgaccctagcctgcacgaaggagggagacaaggtagggggagatagggaagagaacgaatgtcggacgagataaatgatgataggagataatgatgtggagcacagagccgtagaccggctagaactcatcgggtgtcatcggcaagctacgtcgcctaagcaccttcaagccctctcctagcaccagttttaaggtccaggtgatagcaaatgtgaaaaaatgttaaggcaaggaagaaagagaaagggagaaagaggactaagaagatggatagagaggaccttacaggaggtggggctgccgtcagctatggcaaagggtaggtattagggttaagactcaggagggtcctcgcttctcaggtcattcggaggagcaagataccatgaacaattgctatgattggttgatataaataaatatgcaaaatctaaatcgagagcactctcgatttagtcataacgagcgacccccatcagcattatctagatatgtgttaacttaaagaatcttactttactatagtactaatccattaagtaagtagggaaaatattcctatcatctatgcttcaaataaattttctcttaaattactcatccgatttacaatccaattacaccgttgtgttcgtaacaattaaatctttacaacaagatcttacatgattatattttgataaaaaatcacaaattacttttatgatatgtctaaattacttttagacttcactaagttacttcttaaacatataaaagtaaattcagtaaaatctaaaagtaatttacatatattatagaagtaacttagaacaaaaaaaagtaactttggcatgtcatttgaaataaatccgttgtagagataaaaatatgactctatctagaaattaatttaatcagcacaaattatgaaattaagtaaaaacaataataaaaataatcacctcagagcattatgaatgtataggaagtattttaataaaatctaaaagtaacttttatatatatatatatatatgataattcgtttaatgaaaaagacattaattaaagttaccttcgttttgttctaagttacttatataatatatgtaaattatttttactctttattgaatttacttttatatgtctaataagtaatttagtgaaatctaaaagtaatttagatatattataaagtaaattattatttttcataaaaatataatcatgtgagatcttgttataaagatttaattgttacgaacacaacggcgtaatcggatcgtagatcagataagtagtttaagagaaaattgtattcgaagtatatgtagatagtgtctctcatggatggagtggtagctaccgccagtgtgtagtcatgtccaaataaatatggtaaaccgtgaaaatttactataatataaaatcttaaatgttagaattaccaaagttttacaaaagaaagcaatattacctctaaactaatgcacgtcaagggctgcagga

SEQ ID NO: 50519 - DNA, 685 bp, Oryza sativa
ttagcatttggctcttgaaagcattttttgccttcggggttcttctttggttggctaagtcattcatggctaattaagctcctatccgctgaaccctcttggatcgcattgctatcttctagcgcccctccctccctttaagtaggcgtctaattgagtggcaatcagatggtagttggagatcagctttttagaatgaaggttttcatatctaatgtgcgttggaggttaggcttactcatctagttgaaaactgggtagcaagctcttagatcatatcttggatctactcatacttctacaacgacccacctttgaagctatgcccatcatctcccctcccctcaaagggttttgggtggcatcggaaagaacaacaacctaataggcaggcttagttggtttcatgaagacatgtttggttggtttcatgaagacaagtgatgtagccctcaatttttcagtattaagtcagcaagttgatgttctcaaaagtggtgtaaaccggtgttatgagcccttaacattagtatcttcgtggcttcatatttttttcttcatgtttgtgtgctatgttgtctttctcttcatcccttatgttgtgcttttaatattctatccactcccttgttctaaaaacggcgctatgtatctttataatgatcaatacaagatttaggtgggg

SEQ ID NO: 50520 - DNA, 1910 bp, Oryza sativa
taattgttaattaagtaattaatcactgatcaaatggagcgacagtgtcgatgatcgcttgagcggtctagctctttcataccgcggccgctttcattgcatgcgcgagaccgcgcggtcttttactgtgtgataccgcccgcgacgtcattcccacgtcattttcgtgcaacggttatacgagaccgacggtatatttctgtaaaaaaaatttgcatcccaaatattcctgaaaaaaattgaatgaatagtatattttcaaatttaattcaaataccatctaccacgggagtagaacatacatagcgaggatttgtgagctagtctctgacgaatgggcccgctcgtaaaagaagcacaacttcgacttccagttcggctcagacacggatagttcgccggccttcgtcgattccgatcccaacttcaacttatataataattctataagctgagctagacatcagacgacctcgattgattagctaggttaggtctaaccatggcggtggcggccgaggaggcttgccacggcggcggcgccggttttgacctcgccgagcacctgcagtaacagccgctactgaccagtgacgatcgccccaaggcgccgacgatgatcgacgacgacgacgatggttggtgtggcctatctacttcatcatttctgtttcttctcttgattcttatcaaactttgcggcttttttttttcaaaaagcacttaacctcctaaacaatttctcggttcattttagacctcaaatggttggaaatggttcaacttactctcctacggtgtttgtcttttttgtttccctcttggttggttatatttttgcaatgaaattttgtgggattgatatatgcattataacttatctctaaacttttttggaattttttaatcgttgtttacataggtttggaagcgcttggactaatttaaacatagaggcttcaaatttcaagtgaatagtcatgaaaattttttaaactattttagaactttgataatagtatcatatacggctttaaaatattgactcgaataaatagaaacaatgaagagaaatgtaatttaccaattaagtgaagcatttttaatagtttaggaaataaaatgaatcgaaaaatatttaggggctaagtgcttcaatgaaatagtacgggacagtaaattgaacttttttttttctcttcacgatcgaactacagaaatcaatgcaaaatacgacgagtgcaacgcggaagttgaggaatgcatgagaaaaactgaagagctgaactctgcactgcccgaggaggaacactactactgtgtccagttcctacctcgctctcttccggaaccactcttctataccgttcaccgcatgtactttatgcatgacaccaatccaagtaagatttttttttctttttcatgggtatttaaattatttttgttcagagttcaattataacaactgtagttttaattgttcatctatttttcctttttgcaaaaaccaccaccccgtttctagcttacatacttcctccgtccaaaaaaaaacttaatatcatactagaataatactagaatatgacatattctagtacaacaaatccaaacatatatactctatgtccagattcgttatactagaatatgtaacaaatccgaacatatatactctatgtacagattcgttatactagaatgtgtagtatgaggttagtttttttttaacggaggtagtagcattattcatgagatgatgatgatgatcgaaaccatgatgaatacttgggttcaattttgttttctcagcttctctaggtaacaaattatacacgaaccttgaggacagagactacccgatcactatgatccagattttttcaatgcggtttgccggcgacggg

SEQ ID NO: 50521 - DNA, 2179 bp, Oryza sativa
ccgccatcaccgggtcacgggcgccgtcgtctcaacgccgccgcgctgacgagcgggtacgaggacgagatcgtcctcttcgatggaccactctcctcctccccttcttcttcgtcgtcgtcgtcgttgtcgtcgccggcgaaactggcattctctgccgtggtggccgtcgctcaggatgacgagttgagccttcgtctcgaagctgtcaccggcggcgagggtggcctatccatggccgtttctcggagctatctgtcgtttgaagcgcagaagcatgggagcagcctagccgagctggtgatggcgaaagacttggagctagttgtacgtgtcacctggtcaacaatgggcttataaattttgatgacaattaattacacaagttttagcgcgatgggtaggctaataatacagccgatttattggctataaggttctttgtagcattctcttagcccacatatataatactccctccgtattttaatgtatgacgtcgttgattttttaataaatgtttgacctttcgtcttattaaaaaaagttatgtaattatcatttattttattgtgacttgatttatcatcaaatgttctttaagcatgacataagtatttttgtatttgcataaaaaatttgaataaaacgaatagtcaaacgttggttaaaaagtcaacggcggcatacattaaaatacggagggagtagttagcaatttaacaattaatacatggtccacttatctctctcataaaatttttttcttcttacatccaaaccggctaagagtttacaacacacttctcctctcttctctcctctgcctcaacctttagccgacttacggcctcctattatacttgctcttactgtgctatgagaagagtaattaataatagtaaatttgactttgaaccaccttttaattaattactattgcatcgccctttaatgaatattttcacttttgaatcgtgtaaatttatctttgtgatattttagaccacccttaattatttattccatatgcattaacttaatcatatgtcaaagcaatagtctaaatatagttgctggcgttcaactgtgagtagaagctggcttatttgaaattgtttatatacttgataagagagcaggtcagcaggggtgatctaaagtgaaacaaaggtaagattacatggctcaaagtaaatgaaaaatattagttaaaaagtgattcaaagtgaaacgtaagtaataaaatgtgtctcaaattgaaatttaccctagttcatggcatataacaatataccataattgatccaaagctatcaaaacggacgccaaaaccataattgctccataactataagtttccatttctttattatgtaataatgtttttcgtgctagtgcgctcaacccgttacttgtggggcactagatacttttgtaggcatatacgtgcctacctaagaaggacaaggataatagagtatacatttattggtctcatacgccgtttcccgaacccacagtaatgcgagtcaggataagccacatacggaaaggaataagcccactgtaactcccttaactagtagctgaatctaattcgtatccctcaaccacaaaattagatatgacaagtcccccaactattacaaccgtctaaaacgactccaccgtcaattttgaaggcagtttcactgacgtgacatgcatgtgccaacctagtcattaaataaataaataaataaataaataaataaataaataaataaataaataaataaataaataaataaataaataaataaataaataaataagtagaacccacttgtcatcccctctctctctcccctttcttcttcttggctcaacggtgcaagaaggcggctgacagcagcagggtgtcgggacaacaacagggagtggtgaaggcggtggcaggatgacgacggggctttcctctctctctctctctcatcctggcccattcagcaccggtgctggcagtggagtggccagttgagcggggatacgaggcgacggtgtggcgcgggaggagggacgatagacgagagaagagatatagaagtgaaacggtggctgtgaccgtggtgacaccgctgactagctgttgatcgcagtagcagcaacaacatgtccttaatgtgggcttcttctt

SEQ ID NO: 50522 - DNA, 1285 bp, Oryza sativa
aattttcattcaaatataaaaatacttatgtcatgcttaaagaacatttaatgataaatcaagtcacaataaaataaattataattatataaattttttaaataagacgaaaggtcaaacgtttgtcaaaaagtcaacggcgtcatacattaaaatacgaagggagtactaggaataggaatagaatgtatcgagaatatattagaggtgaaccaagtttgtatagaacagctcgagtagatgtcttgtgtgccagcaacaggtaaccggcacattgtgaaaacaccttattccgattcttggacgatcagaatttgggataatacacggctaatgcatcgtgctatggtagaacaaaacattatacctatggtgcaacatagtgaactgctcgttactacagtgaactgcctatcatggtcctctaaacaagacaagatgtctagcttcacagagccatggattcaaccccaagtaacacgtgtgaaaaacgggtgccgatcgaatccatttgaatatctttcctcaccatttttttctagggtaaattaaggtacctccttgtaactaaacctagtttcgaggttccacaggaattttgaatatatgggtacctcctcaaaaccattaaatttctcaaatttggtttttcatgctatcttctcaagtaccgtgaaaatgttaacggaaaaggagaacaaaattaattaatttttctttagtaacatttttatagataatagataaaatctaaattttcttttaactatgggccagtttggattgctaccctaccaaaatttgccctaccaaatttttggtagggtagcaaaccaaacacctctattaaaactctacctatgccacaaatttggctatgcccatgaatttgtctcttatgggcaaattttggtttcaatccaaataaacattttcaactctaccctaccaaaattttgatagtaccaaaacttgcccaggatttggcactaccaaaaatttggtggggcattaatccaaacatgccctatatatagcacacacttgttacaaaacaaagttgttaggtgaagagaagacaaatttcaatcccgccaaggcgccaaaagtagagacaatttattcatacaacaatatattctggtagtaagtaaatctgcatcccactagttaaatagcccacgatcagtcgatcagaggcataaactgtccgtcaatctttctgcaacaaagtgatcagtgggttgttgaactagaaaattattattaccacagcattattttc

SEQ ID NO: 50523 - DNA, 1625 bp, Oryza sativa
ctagtcttttaaacaactaataatagaaatacaaactttttactcataatttatttaatggcttcattcatttttccatgacttatcaaccatacctcaatagatcataggaaaatgaccaaaatggtttaatgaggttctgtttgacatgctctaactccatgagcgtggtagaattaaaccaagctgactgttgaacacatcgtggcagaccactatttctttttttccttaacgagcaaaaaaatcagaccgaaatacgttgcatataaggtgggtcttctaattcttttggctagataacagataaaatctgatcttttcttcaatagaagctaccacaccacttattacgtaattcttggctcgaaaccaagtatagcggtgtctaacaaaggataaaaagatgacacattcaaaaacacaaacatcaatgaagagatacaacttattcaaagagcacgatcctattgataatatcttcatccaaagttgataaaaatttacatgacagttgtctccaactttcgaatacattgtaagtacgcagccttcaaatttgcttgatggtaatcactaattaacttccgaatgcagtgtaaatagtctccatgacaacatggattcactacttatacaacctagttttgtttggctacgataggagtaccaaccatgacaataatgctcgccaaattaaattcctaatgcatctcattcttaggacatcttaatcatcatgtatcgaaccgccaatatatatgctcaactgttgtcaacccctgcattcacccatcaaacaattaaaggagatacatgatcaaggttcagatctttgtagcattggttatttgtgggcatacactaaacaaggtgtagccatgttggtatacatggagcatttcagtgagacactagtcagttgaactggatgcaaatgatgaaaattttgggctgcccctggaaggctagaacgacaagagttgggctccgccttggtcctcatcgcaggcagcgaggggcaagaggtacctgggccggcccatgagccgagccgatttattgatctttatttgggccaacatgtgggccaacccgtcagatctagtactaccatacaccgaccaattcataacttgtgtcaactgaaactgcatgcaacatatacaaccttgtttgtagatttctttgctgcatagggaaacgacaccgacaccagactccatgtacttagaaaatatatccgtgccttgctataaaaaattaaaattattataaataattgagcagagttcaactttaatgattcaagcgctttaagaaagggcaaattagatccgtgccattgaaaatgtgtctacttagatatatatgttattacaattcgtatattcgtagtcgtatcattgaaattttacaaaatggaaccgtgccactgccatcacgattttcatcctcgatgaatagatgttcgaccagctagtgtctttgacttggattcgatgttcaagtcttggcttcaagtcttctggatcctctcaatctgcctcgacttgagctcctgatgcatccaattcccaggagatcccctttaggtctcatgagtcgtgatcctcaaccggttg

SEQ ID NO: 50524 - DNA, 1005 bp, Oryza sativa
ggccgccccccgcgcagatccggcggcagcggccctccgccgcacagatccggcggcggcgacgggagcgggcggtggatccggccacggcaacggcgacgacgacgggaaggaggcgacgggtagggttagggtttcgttttttcaatttcgttttttttttcgattttttgtttttgcatgtgggcgacataagcacccgcacgcgaaaatcggattttcgcgtgcggttgcgccacccgcacgcaaaaatagcgattttcgcagacaaattgctctagacgggccgaagctctgcacgcgaaaatctaaatcgaccgcacgggaaaacgatatgtgtagtagtgtaattatgaaacttacatatataattttcgaacttacatatatatagtgatttatattgtaaatacactaaaattacatatataatttagggatttacaatataaatatacatgctgactatttttcaaatatacatgctgactatttttcatgaaaaatatgatgacacatttatagcaaatccgtataaggttgcgttcgagagagcatgttcggaacgcttgcctcttgcacaaaaaacggagcgatccattagcacgtgattaatcaagtattagttgaattttttttttcaaaaatggaacaatatgatttttttaaataactttcgtataaatttttttttgaaaaaacacactgaaatagcagtttgaaaaacgtgcgtgcggaaatcgagaaggagaggttgggaacctggacaaacgaactgagcctaagtatctatgttggaaaaaaaatccagttccttaattaacagaaaaaaatattatacccttgtcgagcacggcgcgcactggtggagaaatgctttctagtcccggttcataacccccctgtagtcccggttttccaaccgagactacgaatccgggactaaagatcgctatcattagtcccggttcaaataaccgggacaaaaaatcaatctttagtccc

SEQ ID NO: 50525 - DNA, 1508 bp, Oryza sativa
atatctagccttttcccaacagagctagatttcctaggttgactccatagcaaggtggtggtgggatcacccttgcccttgtttgcagccgttcttagctaactccacatgttgggtgtaacgtgcgagtggcatcccacgcggtgttgtggcacacaaatgcacgtcggcaaatgatcagatagttgtgtagagcaacagctaggaagtggagttgtggccatctgcacgtgtgacctaatgcggctttgaccaagcaacatggtgcccatggtggacctgaggtcacctgttggagttggagcttgcttcggttgccacatggcctgagtgagctagggaaatgctaggtgtgttagaggaggagcagtagtcatccattgtagcgcggaggaggtggtgttggtagaggcttgcgtggaggttgcatccaaagaagcaaatgccaacgctgcttagaccctaacagtagtggcaactcatctccatgtcaaatctgtctccaaatcaagttcgaggggagctttgtggcatcctagcagatctattggaggttttttgcaattatttcatgccttttccaacatggagttgtgaaggattggtgtgaaaaagcatcattctccatcttgaaggcgttttcgtgggtgtcctatctcctccactatcaaaggccctctagttgaaatcctagatatagtttatcaaatcgagttgtgatgtcaatattgtcgacaactcttccttagaggcatttctttggtgatcctaaccacatacatcatacttgggtgtttgtcaagttgctagcaatgtcaattatattgggagcaacgatgaaacctctcccccatctgatggaacacgggattggctttcatggtttgttgggcttcttttgtcctgcctcaaccctatcataatgaagttggtggtcatgtagtcagagttgtggcatcgccggagcgtgacatgttgcaacgatggcataggtccactggagttgggaatgtgggttgggttccatggcatgctttgtttcctagttcttcttagtgaagtcagagttgtctgatcatgggtacgatgttgagatgatgatgatagttcgttggtgtctgtatgcaagagtattattgccctttaacattgctacccatgttttcatgcttggattaacttgttaatgaattggttgtgtccatggttttagttcgggttcccttgaataaatattatggttggcctcgtttcaccctaaaatgagtcaccttcttgatatatcactgacggttttgctatgatctttaatgaaagagtaaaatgcattggcggtccttaaacttgtagggttgtgtcatatacattcctaaactctcaaaatgcatattcaggtcccagaacatgtcaaagtgtatcatctaagtcccaaattgacacatcccctgtaggatcctacatggcgctgatgtaccaatgccacatggacgtgacgtgtccttttcttt

SEQ ID NO: 50526 - DNA, 1482 bp, Oryza sativa
aagtttaagaaccgcccgtaccctttacttgtaatgaaaacatatttgacacctagccatttaaccattggtccacaacttctttagggttgtgtaagctctacctatggtgtactagtattttagaaaaagtaaggttaaattttaagttgccttttatttggttacataaagtaaaagtaattttgctatctatacatataaattataagacggtgactgcacaccctgatctactaatgctcgataaatgtgttagctaggtcaaatgactttgggtatcaaatgttgtatactccttgtattctcatggtatgtgaaatttgatcttattgttttgaacaacatttatttccttgagtctatacctggatgacttgaggatgccattgacttgctttagtatattgatggtcttcttgtttgaagaaccaaattgtccaataagcccctgccatttaataaaaacaacttcacattctattcatcacgaacatataaataacaaataagcccatattatacccctcaactatcaggcttaacttagaaaaagggaaacattccatatttagtccctgatgtatatatggtcttgattcgattttggtctctcgactatgaaatcaatctttaagtaaaaagtgaaaaataggaaaccaatcactattggtctctgaactcttcaaagtgttcatgattcgtccttaggcctaaaccagggtggtttataatgatgtggtgccacaagtaattctagcaattcaaaaatatatgtataggatatgaaagaaaaaggaggaaactgagcttgacatgtacacattgtagtattttcttctcttttttttgtttgttttgttcttgtttattatttatattgaagtcatcactatttgtccatgtggagttgtggactctatgtaggcatcacatcattgaaaaaacactatggacctagggggctttgagatttgaggaactgtaatgaatgtttccatagataatggaccatatcttgctaagtataggtggtacataagtaaaacatcaaaattttgattttaaaattgtgaactaatattaaaaccagattgtattgcacttagaggggtattttggccggttttgatagtagagggggtgtaaacttttatgtttcatagttaattggtgttttttttacacaaactcaataatttacgggtgtagtatatatagatttatacctataactaaatagcactaatttcttatgttacttatttttttaaagagtaactataagttagaggtggttagcaatggcaggacatgaataggagtgtgacttttttttctcttaggctaggtgatacgcatcttatatacttatatagttcatccccacttagttaatgttatttctctctactctcattaagtcacatcaaatcaattatttctagcctttggatgatacatctatggttcaaattttct

SEQ ID NO: 50527 - DNA, 626 bp, Oryza sativa
tttcccctacagaaatttgttcatctctaatttctcaacatgtggcctttggaagaagaggcccagaaatcactcaccacattccatctcaacgtcggatcttggatctcgatcatcagctggtttgcgaggtgagcaccctttgttgtccagctcaactctatcaaccctctccactggccattaattggtccatatcttcctcagctccttaattgccttcactgaatgttgaccatgccacaacaggtatggcgtgaacaaggcagttgaaatcaactgtgcagaggtgtccggttaggcattgagtcgagcatgtggaacacggcggtgtgcagaggtattccagtgttggaaataggacacgagggatggatttggcagaagagtagcctatcagacgatgtggatgagtagggatgaagcagaggagccgagcagtactacggaggggcagcatggacattggaggatccatacagtgttgtggaggtgcggcacataaggttgttggcaagcttggttcctcggtctcctccccctcttcgtggtacttggtggtgcgctcctcaacaagggatgagaggatcaaaatgaccaatggaaaggagccaaaaaaaggagaa

SEQ ID NO: 50528 - DNA, 729 bp, Oryza sativa
ccatgcattcagaaccccttagtccgcacatcctcaaatacaaagcacttccctagttagatgtaggttagacttcccgttcgagaaactctaccttctacctgccctcaatttatgcacgattaatgaatgccacctgggtggaagcgagaggtggaaatggaaggtcttagttcggaggtgggatctctacctgatagttgcattgccattcatgatgatcccctggcattcgtccattcagccattcaccattcacccattcaactggaattttggttgaatgccggaattgtgtccacaaattgtggatggatagttggttggctggctggatggctggctggatggctggctggatggatggtgaatggctggcggcggttcggttgctttgaagcatttgttgctatctaaattccatttaaggtcgtaccttatcgcccagcatcatcttattctctatttgtattccctccatctttcagatacggatgtagccttggatgtgcccgtgcccaatgaagaggaagagcgcaacatgaaacgtaagtacaaaagtaccggacacccacccagatcccaatagaatccgccaaatcctgcgggaaattgtaatcccattcaccagctcctacatttaattaacaagagaactattgtatttatctaacacctggattatctccacctttcatttgatccctatttatagattacgctgcgttg

SEQ ID NO: 50529 - DNA, 1051 bp, Oryza sativa
gcctcatctggaccctggccctcaaattcttgactggtctcaccctgttccacataacacaaaaaaggaaatgaatgtgatgatgattattattaagaaaacagatagcgtaaaattgcattcagtaatccccttcttggtcagtttctggagctactaattgctgaaatctctcatttttgacttattaaaagcatcacacatgttttgcaaatgttggaagaaggatacagccacagctcaaacaagagagcaacaagtgaggagtcaattaattatacaattaaacgattagatattagaagttttgcagcatccaagaaacaaataataataggagttgaaactaagaggatgaattaataatcaatgtatccaggtctgatcgagaacttaccaataaacaatttccacaatcatactctaattggaatctgctagtcggacaattgggaagcgtctcgatggtagctttgatgaggcttacaacagacctggtgatgctatcgtccatatcttgtgccggatcatagataccgtcagagtaaatgttgccccatataccaatctcaactttggtaagggtggagagattctggatgccaaaatcagaagcaccattcaggcaatccattccatgtaaacggaattcaagctggaggtgctcaagctttggcattgaccctgcttcaaactccagcatggtcccacatctcttgattcgtaacgagaaatatctcaagttagacttctgaatccttggttgccacagatgatgatccttccattggtgccacagagagttctgactttcgagaaaatgcaagctgggtattgctccaaggatcttaacatcatttggtcccattctacggatccagagttgtaattcagtgagggtttccaagatagctcatccagtttgggaccttacggttgtaacagcctttgatatgcagcttccggatgatgcaaggagtaggagggtaccaaggatccagggtcagtggggccgccagtcaaatatagatgatgaaggttgctagacagt

SEQ ID NO: 50530 - DNA, 1176 bp, Oryza sativa
atgagagtggatatggctcaacgcgataatcatgttgatacacgaagagtattacatataggcgctaaccttccatagaacactcgaccgatttatggaagcatgatcgggaggttttaggaaagatggctaattagagatacatgccatatacagtctaacagcggcagaggcgcaggcaagcgacaacagagcaggtgcgggcaagcggcgacataggcgcaggccgcaggcaagctgcaacaacggagcaaagtgtgaacccggactgggtacctgtctatctttgctatttttctttactgatgtataataattaacattgcaaataatttattttattttacactgatattagggcaccaagagcagcatgattcttggttcttagtttttttaatgcatgaatcggactttttttttcgcccttctttactggttttttgttttcttatcgcctttttacgacttttttttctttgtgtcaaatcggactttcttttttcttgtttttatgttttttcgcagagatagtgatgcataagagatacaaatagatatttcatgatctcttcatgatcagagattctatctttttttctgttttttaatttttttctctattttcatattattttcgaactcttctcctcttacgagtgtatcaaaattttattcttccagatcagaggttttcaaatctacttgttttctgatatcctcatagtcaaagattctatttgtattttcagattttttttcccgatctcttcacttcttttaaattcagaggttctcatttttagttcatttcgtatttgctccacagaatcttcgtctacctgcagtcccgtcgctctctcaccagcagccatggccgcggatcccaccaccggcggcggcgaggcggagtccttcttccgcgccgcgccgccgctccgcgaccaggaccgcgtcgccggggacctcgccgacttcgtcgcccgccactccggcaagtccctcctcccctcgcctcctccttccctctcctccgatctcatctccttcgatgcgtcgcgtggtgggtgagtttgctgatctcgatcgtgtttggtggtgggtagggagcggaggaggggggaggctctcccgggtgtcctgcttcacctccggcggcacgacggtgcccctgga

SEQ ID NO: 50531 - DNA, 993 bp, Oryza sativa
ggggctgcccgccggcgcgtgggcttgccggcaacgcgggggctggccggctgacggcggcgtgccgcttggcggcggggattcctttttttttctttttttttttcagatctggagctaaaagtttgccaaacacttttgatgggtctgtaactccaataggagctagctccaactggagtaggagtttggagctggaagttgaagtttggagccctaccaaccgggcctaataagagttactcccaccacctgaagcggatggtggtttttcctgcttttagccatggggcccacctgtcagaccacctcctcagctcgcctcctccctcgtaggcgtcgacccttcccctccacctcaaagccggcggcatcctttcccggtgatggcagcgcccggcgagctcgcaaacgacggcggcgacgcaagtccggtgactcccatgcccgctgggggtggcggcggcaatgcagcttctcttccccgtcctcttcctcccgcgcggcctccccctatcctccctcgttgtggcgtcgtcctgcggcagctcgcgagtgcatgcgcggcggagttcgaggcgtggaggatgtgcgccctgcccccgccagatccagctacgtgtcaccggcggcgtgctgtgtcgcccgccggcgggtgcgggtccaaggggatcaggcaagctgctgcgctcggcatcggcctcgtactaatcgtcggggggaaaaatggctgtgcgctgacgagcatgtggacatccaggcatgactcatgaggcgatccttccttcttttgcctcgcagtcgcaggcagcgatttcttgcaaattactccaaattgctgcagatcagctgaccttctagcgtacagtgacatttagttttggttccttgattccttgtgcaggaagagggcagggaagaaccgggggagacgacggccatgctggagaatttcgtcccaaatgtgggttctatcaattttttttagtatat

SEQ ID NO: 50532 - DNA, 1261 bp, Oryza sativa
gaaaaaaagttaagcgtacggcagcatgatatttctgggctccaataagggttagtacttatgctaacaacaaagcaatagacattgagtcgtggtccacgtgaataaagaaataaaaacaagttatttattattatagtagtggtccctatgtatttaagaaaagggtttaaccaatggaacgagaacacaaacttgagtatatgataatatgacatttctcggctccaacaaagccttccactatccgtgctctgtcaacattctctatatatcatggcgagaccaagacctcgtagctggctggcttgctggctctgtttccttgccgtgcgcccatgccagcatcgcattgccgccttctagccttctcctgctggtgaggttcctctacttctaggctcgagagcactactctttttttaggggaaaacggcaggagctctgcctattcattaagaggaggaaaaagagtttgatacagattctgggcacctccaagagatgtcacaacaaaacatgaaaacatgaaatctgtgaaatctaggctcgagagcactactcttctagttcatagcttcgtaatgcaatctgtgattgctactagagtactatcataatgttatattgtcaatttgtgattagtgaacatgtgaatatgcaatttgtgattattgtttagtgattactgattagcttgcctcattgatcatacccatggctaattaattagctcataacttaggctgctgatttgtgatttgtgaatgattgaatgtgaataaataacttatgttattgtaagattggtattgttttatatttggtaaaatatgaagaggaatgggattggtattggcttaccgtaatatttcaacattttgtacttgcttgtgcacattttggacttgtttgttaaattagtcgattattgatgttgatattattgctacatttgcatcgtcttttaaccaaatttgtaattatatattgtgtttgaggtgtttgcaaaattttcatgtgtgatgtgaacttcagaagtaggactacccaacgaaaaattcctggctgtgccaatgcctttctcaccctcgagcccatgaattcgctggcgaaatcgccacctagcaccacacctttggttcggtgccttccctggccaccccctctaagccgggggaacctcatattcatcctccttattagggcaatagcaatgcgccacggatttttacatttcctcacatgccacatacactaa

SEQ ID NO: 50533 - DNA, 1218 bp, Oryza sativa
tccgccgccgccatctccccttctcctccctaggccgttgccaccaccatcttccttctcctccccaggccaccgtcgccgccatcttccttctcctccctaggcctccgccagcacctcgtcgagctcgacagatccgaccttgggtttgccagaactggcgagcggcaccactttaggggcgacacacttgctcgggggctacagcctctcaatgcgccgctccacctgcgcgcctcgccccgcgcctacaagttttgacgaagaacgcgtgacttagtttggcatctgcggtcttgagttgggaatgccacgcacacatcttgagttgggaacgccacgcacgccacctgcttctcgcctttgagcccacggatcattggcacaactagtgtcctacgactggtttggtgcctcctcttgcaattcctctaatcgcgagtaaccccttgtctatcctactcatgcaaagtcccgacatgaaaccttaattaagggggctcattagagacaacaagaatttggctcctcacacaagcttcccaatgcaaccttggttcatgaggtaggcatacacattttagaaccagtgttattaaactctcagaatccaggtattcaaatcaatccaagttttatacaattatcagtaaggtactaagtcctgatgccacaatactaatcacaccgtgcatgtaacagcgagggagttgtctctagataccatttatgggctacacacctacataatggatcacttctgctttcaaactgattgatggaggcaatttaaactggtgttaattaaatgttcagaatatggtataacaccgtaatatgtgaataattattcctttcattcatcaccattctatactaaatctccgacaatttagaaactactgaaaagtacagtgaagtggccttacaactggcatttagcaagtgctctacccttctagtgccgcgcatgttaatccagcttaaggaaggatatgtggccgcttgtatgtgattaaataaaaggattgcaatgggctgtgtatatacaattttaatgataacaacaaacactgtatctgcaaaagaaattaaattagcattggcataaatgtaactagcatgtattggcaaaaaaaaataaaattaactaacaatgtgatagcataaaatgtgtatgtaacacaaggtgttaatttctattttgcaaataatgtt

SEQ ID NO: 50534 - DNA, 4090 bp, Oryza sativa
gagaagaagattatacaacttcttgttgatggaaactattgcttcttctctcttcttataatgagatggttgttaagagcattaggagaccaccactgatgtaagaaaagccacatgttgtatacattagaatctaatctttgtgtttctttcatgtttggatcttttctccccaagatataatatcacagatataacaaaataaaaatgtaagaaatgtgatatttattttgttatcaacataagtgatatctgttctctcattgaaatgaaggtgcataaatttgtcattggccttctttttcaatccttaacaagtgcaccccttctcttaaagggggaaattagacctttaccacttaattgtgtgtgaattaagtacttttcacttgatggaagttaatttatttagtgtattgcccaatctatccaactgtcatgcacatcaaaagcaaaaacacatgctttgatcggtagcgcgtggtgggaggcaagtgtgggccccatgcaaatgtgtcccatgcaaatgttggaggagggcagagttatgcactgggtacatggtgcctcgcatgagtcccatggtgtgaagacgtcacggatgacattcattttctagcatttttctaagaaaaaatctataagaagttgaacatctttgtaacaaggtggcagtaggtgagaaaagcctataggggttgagccgtggcaccccgtgcataatgaaataatacatgtttttttttttattatggatgtggtccctacatgtttaaggtggcactcggtgagttaaaaaggaaggggttgagccgtggcaccagtgaataagaaaattaagacgtgtcgtttattattctagtggtggtccctatatgtttaaggtggtagtaggcaagaaagaatgacatgggtttagttgtggcctcagtgaataaagaaacaagagttgtttattataatggcagtgttcacaacatgtttaagggaagagtctaaccaccgtgagaaaaatagacttgagcatatgggtagtgtgacatttctttggctccaacaaggcattctattactcatgctctatcattatcatctgtataacgaggaagggcaacatattgtaccacattaacctattttctcctagccgctttaggttctcagtatgcccgctgccttggccacccgcttctcacctttgagtccatggatcaccagcacaaccaccgccttgcatagtgtattttacttcccctagtgtcccctactttgatacactcacaatgttaactacattctattttgcaaatagtgttaataacattttttgccagatattgtgcttattacttttttttgcccaatacagtgttagttacacctattttgcacatatagtgttaaccatttagcattatcatcaaaactgaaagaatatagtactttgattaacatgcagaaaaatgcttatttcttttatttaattaaaaggattgcagtgtgcatataattaacatgacttattatatgttcgattgaacatatgcatattacatgtcttgacatgcaagcctacataatatcccaagcagcgtccaacttagtgaaattagttatgacatgttttttagctttggtttgcacacactaaacaagtttatacaccaaaataaatgatttacaagttcatgtactaaatcgcacccacctcgcaagttcatgtaccaatagtgcaatttactcataaagaaataaggtatggtgagttgtttattgagtaaattgtactgttggtacacgaacttaagagatgagtgcgatttagtacatgaactgcaaattgcttatttcagttcataaacttatctagtatgtgtgaaccaaagccaaaacaacatgtcgtaactaatttcactaagttggacactaattaggatgttatgttggcttgcatgccaagatgatgttgcctaaatatgcatatgttcaatcaacattcaataagtcatgttaattatacatattagaaatgtacatgtcttcaggacaaaatgtccaaccactggagaactaaatggttacatctatgtgcatgatgtggcatctttttggtttttcacaccggttggttgtatacttgtatgcttgctttaataaccttatctttacaaggacaggtaagcagcaacaattttcatcaacaagaagttgtatatcttttctcccggtcaacgacaatcttgataaagacaaggttgcttcttgatggtcgatgatgggtagagatgaagatgatacaacttcttgttgatggaaactattacttcttacctcttcttataatgagaaagttgttaagagaactaggagaccatcattgatataagaaaagccgcatcatgtgtacattagaatctaacccggggaaatcccctttgcctctcctcctcctccacccaccctccttgcaccgtgaccccaacctcaaaccctaactagtcaaggccaccaccagatattgcagtcgaagagtcgttagagttgctggtgttggcatatttgggggcgagaccgcgagaggcttggcgcatgaatcttcaagtgaattggatgtataaaatatcataaaacttctccttcaaaatttttttttgtcaaatgttagttcacaaatccaaaattttaagtagaatataaatctcaatccttcacaagcattgcccttctcatattgtaggaagttaaatattacctcctaatagtgtgtgatttaagaattctccacttgatagaatttaactttaacttaatatattgccactttgcttcttaattgattattttcatcgtattttaccttcccctgatcacctggccaactagcagtgatgaagcatcattctctcagccaaagaaaaaggaattgtttctatttcctttctcccgggcccaaaggatgtagtgacacaaccaaagtgttaattcaatcaaagtgttaactacgtacattttgttttgcaaattgtgttaatgacattttagcccgatattgtgcttataacattttctggccaatacagtgttaattccatttattctggccatatagcattaatcaaagcattatcatgaaaactgaaataacataacacattgcgattcttttatttaattacatgcaaataatcactgcatatcctttcttcatctggggatgcatgtggcacgcgtgagcctaagctttttgtcaaccccataatcaagggacaccagtgaacatttgtaaattccattataaattagtgttttcgtagcatagttgtgatgtgatcccatggagtaatattggtgacatcaatggtttcttatcgtagttctgccattattgttacttctattctttagtatgttggggtctctatcccaccaatggataaatgaacttgcattatagaattacactctaaatgaagctaatagtgaaagggcatgtagcttagtggttgtagtgagccagtgacctgagtagcaccccaaggtcctaagttcaaatctacatataggaacgaattttagattgggttatttgagagctaagttacctgttcgataggctatgttcctaatttaaaaaggctgcatatatccgattgtatacagaggccgggtaaaaatacccttctctaataaaaaaacataaaaaagtgaagctaataagaaaaaaaacctaattaaccactgcttttgcgctgtttttctagttaacactgcttttgttcctaacactatatttctttttataatgaaatttaattccgacctttcctttattaaaaaaaggtacacccaaccgtcacaaagtatatatgcacaaataagactgaaaaacatttcgggatatcgcacggagtctaaaaaccaaaacgccacacatatatcggattaaaaaaaacaccaaatagactaagacattattaataacattttcttttactaaacctccatacaaggttgacgaaaaatacataaccaaactccgatgtacaaactgtattatgtccttttgttcctaacactacataaatagttg

SEQ ID NO: 50535 - DNA, 1020 bp, Oryza sativa
tgcaaagagtattaaatatcgataaagaaaaaactaatggtccagttggcatgaaaatcgcgagacgaatcttttgagcctaattagtccatgattagtcatatatgctacaataactgacatggttaatgatggattaattaggcttaataaattcgtctcgtggtttccaggcgagttatagaattagttttttcattcatgtccaaaagctcctttcgacgtccgatgtgacaaccaaaaattttcttttcacaaactaaacacaccctaaagccataatttggaacgtgagaatttggcagcttgagaagtgcattgtcttatatactatatccatcccaaaatatcccaaaatatagcaactattaactatgaatctggacatacagttgttcatattcagtaaaaaatgctatattttaggactgagggagtactattttaattgataaaaaaccagcacgtttgagacctacttccttcgttttaaaataaacaaactaatccagtacaataaacagctatctagatttattgtattaaacttatgttgatttattttatgatggagggagtaagaatttgacaactgaaaatccactgcggattcatggtagatatccaaccgtgaacaagtctgtttatgaacaggacgttttatgttgagaagctatgtaacatatgcaccataaaaaaaatatacgaacaagacgaaccatttggtgttctcaaaaaaaaaagaaaaaaaaaagaagagagacgagccatttggagttgctgcacccatggccggagcaagtgaagaaataggaaaatagttgaattcaaacggatttataagtgctaaatggatgaacatatctgaatgctactacatagctagcctagaagtcatctttcgtgatagacacggcgaaggaaacaagattgcacaatcgacccaagagaaagaaataagtaatttctaccaaagatttcatctgtatgcagaaggtacatttgattcagaactgggta

SEQ ID NO: 50536 - DNA, 874 bp, Oryza sativa
gcaacttgcaaataactgaacaaaattaactgtttatcctaggctgtagctacaggtccatcacctaatgaactatgaaatcatgtgggtatgatcgatgaatataattgtaacaaaaaaatggcatcatttttaacacgatgatggtgtttagttttgaagttatggagtgtatttctttcgtgcaatagcgcgtgtgcttgcgtcgactaacatgagtcaggtcataagaaatcttggtatggtagtctattgatttgtaggaagcttggaataaatcttagtcaatagtgaggacttggactaccactaagggaagagctgaaagacacatggtagattgacattggcatcgtttgattgacatcgtgtagaaggattgatgtgacatgtgactcattagtgttatgttgctcgaaattatggtagcagaattatggacttacaagaatgttgaccttgccgtcgaacaaagtacgtaccttgccggcaatctcctctttgtcggtgcgcaccaacacgttgcagacggagacgatgatagtgaggcttttgatcatccactcctcatggtatatactcagctccgcgtcaattggtgcaggcgtgcattgttgcgccgaagcccacgagctcctccacgatgaagcggctgcacgcgtggttgattctataatggacaatttggtagatagatgttatgtagcgtgttggtgaataaccacttaggggctgttcagattgatgccattttcacccataccattttttgacaaagttgccaaaaaatgtctacgtttagtttgttgccaaatttgataaatacaaaagaaatcctgccaaaattttggcattgccaaaatttagtaaggtt

SEQ ID NO: 50537 - DNA, 1289 bp, Oryza sativa
ctgtagcatcacattgtcaaatcacggcgcaattatatgcttaaaagatttgtctcgtaatttacacgcaatatgtgtaattagttattttttcgtttatatttaatactctatacatgtgcctaaacatttgatgtgacagggtgtaaaattttgctagggatctaaacaagccatttaaagaactttaaaggttttggtgcacacaaaccacctaccctattaacattgtttgaagcaaatttctttctttttcacatgtttgattattttctttgaaacaatatttatttcaaatataatttaggactgagggagtaagagccaatgaaccaatctgatgggaaaagaatgtgggggtgtcagtctcaggctctcagccaaccaacatcaggcggagatgacaacatcgacgacaggcagctatattgaagctctgaattcatagatcttgtatcagagcaggtacaatagaatggttaagcaggcttcaaaatttctaatcctaaattaagaaaagataatcaaagagagagatgcaagcgggcgcttgttctaggcgcttgcacggccccccacatgcatgcagctagcaggggtcataaaaagtgtgttatgtgggtcccatagagaaccctctcaatcctctactccttccattttacctgtgtttgctgtggcttttgttatgagctagtgcccactgctacactgttggtggctacaaagatgaatagcagcattgatcctaatagttgatatgcccatgcaaaatattatacttgtcattgccttaacttgtagctagcttatagccttatagctaacataacgtataagttagctctaaattggcttttaataagagcaagttaaatagtatagccaactaccagctccaattcatctatagccaatctaatagctcattcatacaatagttacgtactacactattaatacatggtcccacctgtcatacacacactatgtcttggagtccgtgctacagctgactacaaatctgtagcccgctgcccttttctctccttatttattttcttaaaatatgtttgcagctggtttaaagcctactactatacctgctctaaaataatgataatttggagctagcagccagcggtactattgaccttgctctcactgcaattgaaatggtagcaggcggaaagaacatatcgacggtcattggtggggaaaaagccagaaactgaatgtgggtttggtggaggaagagattaagaaggagaaatcgtggaagacgaaac

SEQ ID NO: 50538 - DNA, 1908 bp, Oryza sativa
ttttttttaagcggatgtggatgacgtgcggatgcggatgcggagcggattatttcggacgtcggattcggtgcggagtcggtacggggttcgaaaatggataaaaagttgtcggatgtcaagtttgtattcaatccatacagcaaaagggcggcaatacaattagccttaatacaatggcaaaacatcattagttcactacgttcatttcaatagtataactataagtgttcactgttcagttcaatagttcactagtcaaaataatccaagatgcatccatgatccatcaaaaacataatataaatgttcagttcaatagttcactggtcactgcgttgcttagaatgtaaaaataaaagtcatcactcatccgcatgaggcaagccatacaagcatacaacacagagcagtagagcatacaggatcctaataaatgaataaatgatgaacaattaatcaaattataacttgctattgatgtaatttccgcaagcaaagctcatctttacatttctaatacccaaatttgaaacttcaaataatcaaattggattgcaagtgtacaagaaaacaatacatcaatagttcaatacctaatctatcgttggccgtcacctcgtgtcctcgtcgatacaggccgacgggccgacaactgtctatactggggctggcggcggcggcgccagctggagctgaagagaagcggctggcgcgccatcaccttgtatcctcgtcggtacaggctgacgggccgaccctggggatggtggcggcgccgagaagccgacgacgagcagcggcggcgccaactggagctgaggaggagcgacgctggctggacctaaaaaggaccggccggcacgaatggaggatcggcggcaccaccagccgacagtggcgctccggcggcgcgtgtgggaaacagggtgaagaggaagagacagacggcgcaggcatttggcagagagagagagagagagagagatttggggaggattgagtggattaggtcacaatagatgggctacaatagatgggctacaatagatgggctgaaagactaaaagttgcggattatccgccaaatagtacatcggataatccgatcaaaatatcggataatccgcatccgtcggatatcgttgataccacatccgcatgataaaatccgcatccgcatccgcatctggccggatatctaaaaacccttaccatatcctcacatcggacggattcggagcggatcggagcggataatatccgctccgttttcacccctaagtctatacccccttcttgttcaaataaatggcattactgactttatttagttaagcttttgaaactttgagcatcaaatatatggcaaactccccaactacatatatggagtagttttcaccggtgatggacacaaatgtgattacaaacgcccttttgccaccggtcatccatggatgtgcgaccgtttcttcatcgatcgatctcccaccggataacctcattcaaatacctatctagtttgaccttcgagaagttttacggtccttgagaaagtacctcgaggtacctaaattttacactaattattttttacctcgatgtacttaatacctgaaggtttcaagttttatacttaaaaactttgatatatactttccagtaatttctcaaggatggtaatattgtcctggctccaatcattgcacatttgcatgactagttgtgtattccatccgtcccataaaaaactcaattctaactctaaatttggatacttgcttgtcaagattcatagctagagttgatctttttttttaaacggagggtgtgtgtcactttcatggataggtatgtacatggaaattgtcaaagatagagattggttccaactctatagatgtt

SEQ ID NO: 50539 - DNA, 1071 bp, Oryza sativa
cccgtttcacccctatatagactaatggttgttggtttcatttagatcctattttacctcattgatgagtttaactcaaataccaaggagtcctgtggtcatcattctctagctggatagctgcaacctgtacacttagcatcaaccattcctcaaaattcaacgaaacacccttcttaaaaaaaaacataaattcaacaaaattcaccatcaaacagtagactgactgagccctctgttttcaagattgtttgtatatgataacatgtttctgcaggaataatgtgcaaaacctgaaggtacccaaagacagtggtgaaaggaagattcaacaataggtcttccttcatccaaggggtggatcgaacgtttggaccagtggagtcccactagcctcccttcatgtttattggtcatggaaagcttggtgtcttttaatatgttactatcctattatatttagccccctttaatacattttctggacccgcccaagcctatattaatctcctgcaatcaagaaaaacaagccactagtcacactattgtatcagtccgacctataagttgtaaccagtgcatctgtgcatgagaatctgtttataccttcggataattgcttaacgctgtcttgaccaccctggcacggagagcccttcccctcccgtccctaccaccacacaggattgggtcaagaacgcagaaaggttgtatcatttccttctcagtcatgctagatgaagaaaaaacagaaaggaaaggaactaaaagaaaataaaaatgaatgatgagaaggatgataaaaaaaagcatattatctacgagaaacatacattaatctataagcacatttgcccctttgaatcgcaggattaagaaaacatagaaataggaaaaacgtaaaattttggtaggaatgtaagtgtaaaacagaggattgcaaaacgcaggaaaaacataggaatgatcgtttgattgaactataggaaaaatacagaaattggatgagagagatagactcaaaagaaagttaccaggaggttgaagctcttgctaaatttccttcaaaat

SEQ ID NO: 50540 - DNA, 678 bp, Oryza sativa
actgattgtaacaaaacatttactgaataatactcctatgtgacatcatgttgtgtacaaaaacaagatgaaacccaacaagaaaaactgaacaagggaatatgataaatgcatgcacaagcctgtacaaatagaagcccatacattccaatcctgagatagaccaacagcagtcttcccatatgcaatggagaaattgagcattttggccttcctcctctcagcgccaaaagcatcctaaaaaaatagaaatagaaacatcaagtttggtttaactccatacctattagtatatagccttataccattctaccgggggtccagatatatataaaaaaataaatacatatggaatatgtatgccaaataacaattgataaaaagcactatatgcaacttgccaacttcttcaaagcagaaagaaaacatgaggccctaacatatatttgtatgacaagtgaggttatcaaaattaaattcgacacttttttgtgtaatgaagtcatgttatccgacaaattatgtggagcactaggcacaactgtcacagaattcacatgttcaaatttctttaaaaaaaatgccacaaagatatatttctcaataactaaaagaattaaaatttgactgaatgaactacaatgaaggtaatcatattccatcttatcacaataagca

SEQ ID NO: 50541 - DNA, 501 bp, Oryza sativa
caaaaaggccacacctttaatgtccctcattgcaaaattaaaagattaagctggcttgtgggcgttagcgggtgctaagagattgcgcgagcttatcccgcaccttgtatagtgtacagtttttggtttttgccttttctttgcccctaggggctgtatttttctcccactatattcaatgaaaaggcacactctcgtgttggttccattaaaaaaaaagacaagctagctgtgtccattttctttcttctttcttttaattttctttcttctttctttttttctgcggtgcatgttaacacggccggtcctaacttttcagggccctagcgcgaaagtaaatatagaggccctttcatactatataataataatcaatagatacatatactgaattattatgttacatttaaattgcatttagaataatatttatataaaaaacatatgttacctcaaaagttattatagtactttaactcatataaattacactacaaa

SEQ ID NO: 50542 - DNA, 559 bp, Oryza sativa
ccaacaaaagtttcctcataaagtgaccacctgcaagcaagattcacagaaatatcataaataccttcaaagcccattaagagaaagaataacatctgcagaatgctataacaaatttgagcataagtttggctagtagtaaataaactagacttcacattgacttccattgacattaacctatgtagaagtagaacagatatccatagactacgtgagaaatccatctcagaaaatattctgttgcacatactgatcatgtgaaatgaatcccatctggaatcacagctagcaatataatcatggcatttcaggaaatacggttgctgccaacatgacattcagaaatttcattccaccatacataacaaactataaattgatgacctttccttcttctctgaccttacttcaccccaaatttataatttattggctgggtttagttccaaagtttttcttcaaacttccatcttttccatcacatcaaaactttcctacacatacaaacttccaacttttccgtcacatcgttccaatttcaaccaaacttccaatt

SEQ ID NO: 50543 - DNA, 656 bp, Oryza sativa
aaaaaatccatctcacaaattagccgtaatgtgtgtaattagttaccccctccatttcacaatgtaaggcattctagcatttcccacattcatattaattttaatgaatctaacatatatatctatctagattcattaatatcaatatgaatgtagtaaatgctagaatgacttacattatgaaacggaggaagtatttttttagcctatatttaatactacatgcaggtgttaatcttacttaaaatgaatttggccgattacagaactacctaagatgaattttactgtcttggttttttttccctttgaaatgtggctattgagtaatactaatcaatataagtttggcaattaccgcttgcaaagtctgctttgtttttgtagctgacttgtaaaaattatgggcagtagtatttttttttccttgatgaatggcaccgcacaatctatagactcttcgtgcacctcaatgtcgtgtaaaaatgatggccaaactagaagaaagagagggaaaaaaaagagagaaaagaatggacgcttcggcttcgatgtctgacaaatacagttaaattctctcgacccctcttgttcttcaatttaaaaaaattcaaaaaatcttcacatcttgagattccaaacttgctactagtata

SEQ ID NO: 50544 - DNA, 1605 bp, Oryza sativa
gggcttggtgtgttgggctgatgcaggaaaaagggcataggtgagtgtaggggtattttaggtactacacaataaaatgtgcactttagaagctacaagttgttatattttgggacaaaatttaaaccctataagttgctatattttgagacggaggtagtagttcttttgttctaattgtgaaatgatgacatgctaatcttcattacagttcttgtgaccaggagatattgtctaactcacaccttttgcaggcattagtttgagattgctctcaagaagaatactaatgagagcaacagtgttttatggagcttcagtagaagacagtgtgaagtaccaattgataagtctgacatgaaagcgagacttggagagcattttgacctaacttagagctaattctttacttatttctttcattccaaagaactttaatattgaaccaccaccatctttttcttgaaaataattgctgtaattaacataaaaaaatctttggatgccgatgggggacccaccctgtccatgagaagtgcacgatgcgctgctctaaaatatcgtagaaatttcgctatagagtatgtttgggttaatggtcgcggtttttgttttcttttggtgttcccttgtactaaccccggacttaacgggcttgtatgagtcttcttagactctttccttatcctaaatataatgaagcccaactatcctgcttgtttgagaaacaaaatcctagaaattcctgatgctgcacatacatgttataaaccccatgtattaacatgctttatatgcttataattcgtctatttatgtattatacacaagatttgtcatcaatatggatgcagtttacttttagttggtgtttttggtgaaaactttttttcggtttagaactaatctgaattatctacatcttggtctggtttcatctatttaacagacaagatatattctaaaaaatatgactgcaatgctaatttcatttgatacttggatcagcataatctacattttggacttctttttttgacgaaaatactgtcaatttggacttgctagctagatgtatattatatatctgaacagttcctgcactgatcaagttagtaccagtggcaataaccactcactgatattcttattgggggatttccttgtggttattagtgttgtatacttgcttaaacatattgtaggctgaaattgtaaggtcaatacttgctatcattgttgttatttatcaggtagaagttgactacttgtggtctttccatctgaagtttttgttttactcatagtacatgaaaaattttaaatttgcttaatcttcgcttatgctagtttatcatgaaatgaatcaagatgttccataagttgtaacatgtcttgctggtggtccatgatttgtagatttctgacattgaaagcttaattcttttatttttgtggttagttgacaatagcatgtgatatactcaccttattctgctgcattatcacatgatttgttaacacaccattctacttcaaatttatgttgcaataacgttggataatctcagaacaattaatgtaacctatttgtgttgctgccaa

SEQ ID NO: 50545 - DNA, 2585 bp, Oryza sativa
tcaggttgtgaagcacacctcccaacatgacatcaactaggaataaaaattgtactgattaaatagaggggaagcatggagaggtaatggaattgcattccgcacttctcactaaacttgagcagctttatttgcaaagctgcaggattgtgtaattgttgcagaaaaaagtgcaccagcaacgtttaccatttgttcgatgcatatggttcattacttctatatatgtccgaaagtgccatgtcttggatcatgtcttacattttagctgcctacctttaacattatacaacttatctgcatagtctgataaaacatgtgcctgcatctatacaccagttaacttttttggggggttggggactttgggggagggggggggggggttaaagaaaactttatgttcactgtcaagtctgatactgtcactgtgtcacacacattgcaaaaaagttttaactcaattaatatcatcattatttcctactgcaacaagagtcaatggcagatacttgccccctcatttatctcttgagaaggggtattgattatcatgatccatctaattatgttgagcattatccattgatacccattgggaaaattaactagactactagcattagctagtgtgtgaaagatctctactcaatgctattgtgaacatctctcttttaggcttttaattagccatctaacctgttagtaatgattaagtacatcgctttattcagaggaaatgaggcaggaccaccgacattgatcagttctcttttttaggggatacaacactgatcagttctggcacttcaattcatggctacatcaatctgcgatgtacctttctgcttctgtcgtacgtgtttaacattttcttttacatccacaatctatgtgctatgacaccctaaggactactgtggtaatcaggagcctcgcgaggaatctttcttgtgcgcagtgatggtcatggtttctcttggcttttcatatgatcataaagcaatacaagacatatatcttcattttcttcaaaaaccaaggattagcatatgataatggttagtaaatggtaagatactaatatactttagtctgttatcaactgaagattgagcctgtatccaaggctccattttttttttcttgcttacaagttcatgcatgtccattgcagaaggaacagcaagatgttgaacatgtaatgtatgcactaatgcacatgcagagctgaagagacatgattctgaggtaataagtcagtctttaagcattgcatacttactcattcgtatgtatcttggtggaaatcgtcggcacaaacaagctacggtacagatggccctcgaggatgctcaagagccaaacgctagaagaagagagctaggtgtagccaaggacagacttgccggctaactccaaggcgcttcagcaaagctgagattcccccaataccaggagccggcaagtcatccttggctgcatcccgttctcctcctcacagtgcatggcaacccagcagaagctgcctcagtggttctactgcatactgaacagtacaggtactcttcctacttctcttcttccttcccctaccatggctgcttttctatcatgtggtttgatctgcaagcgtgcattgcaatcgggaggtatggcctgcatttataggcacaggcacaggcaagttgggcttggaatcatatggcgatcactgttcaatggattctttattataaatatttcatcaatcatagagtttgccattttagggatgtgatgatgactcgcgattggttggcctgatttccatttttaaattgatatagtgggccctgaggatgtggcatcctctcgatatgggctgttaggctggcatgatcccctcgggctgttactggggagcctcattggttggttgggactggggattgagctgttcgcctgttcctattggctgctcgcacgtgagcatgccttgtgtgatctcgatctagtgagttttttttgtaacaacacctcaacagtcctctttgtaccccagtgttgccagcaaaagccaagttaattacctctagatacacacacattgaatctttggatatccatgatcttgtaagtagtactctaccttcaacctaactcagtacaaataaaggcattgatcttcgatcatctttataactccattatttgacaaaagaacctagctagcttttgttatattaatttcaatagcttcaagctactttttcaggcatgcatgtgccttcttttgcctggaaatggatgggagcatttggttcatcccgcatataagaatctaatagttacatcaacagatttatggtacatcaccgtgacatgcatgcttatgttaattgtcttgtttttataagaaatgtttgttttattgtacttctattcgaaccatttatcatatccgaatgattttgttaacatagtgtagctgtgaatatagttatggataattaaaatcatgtttgaatagctcatattactattatgctcaatatcgtagattcaatcagtagatgtgttggaaaagacatgtgcgtgctgct

SEQ ID NO: 50546 - DNA, 1825 bp, Oryza sativa
ccatgcgtgatggggagcgttagctatactagcgtcgatcacggtattatgcagtcacgtgcgggtggaactgcggatatccgagcgcatataccactttgcttaaacctccatcgatcgatcacaaggttttctgctcatccagctatcggcctagctaacatcctagtcttttaataacaatcaacttaattgcaacgccttttggttttgtgcctacaagaattatgtaggtaaggaggcactagggaggcacacccttcccataaaattttagttttaaatatgaatagtcgagattacattggcgttcagatcacttatgttatgttctcgttcttaaaatgaaagcttcatttttttagctactacgttcatctgaaacttcttaacccaatagcatgtttagtttgattttacactaatgcctaggatagttttcatctccacactttctagacatataattgttcatgtttatagatatgattaaactttctttaaggacagaggggtactctcttgtgagtatttgagagtagagaattagagaagattgagaagatatacaaacgagatacttaaaagttatattaatatatttttttaaattaactttgatatattcgtttagctattcgaggaatgtgtatacaaaaaacgaaggacttttccatccaatctgcttccacctaacacaccctaatctgacgtttgttgcacgatacacctccgctgggccacacgaaaacgagatacacacatcctgcggagcatcaacgtacgaacggtcgccgtacgttcgcctcgcccaaccggcacgcagcttgcggggacgcccgaaagaccgaccgatccatccatccatccctcgtccccggctccccgccaccaaccgcccgggaccgggaccgtgcccgcagcagcagctggtcccgcacccgtacgtgcacgagcgcgacgtcgtcacggttgttgcagccacagcgcccgcccgccccctggtccccctgatcccggcctctcccggccgcgcgcgcgcgtaccgtgcggcgtcgtgcgtgcgtacatgcgtgcgccgtaaccagcagccgcgcggatcgatcggtggcgcgccccacgggccacgggtcggccctccttttgaggttgtaaagtacgccgtgcttatccgcgggcacgtacttgcttttccccattttgtctttttttctcttaccatgggacacactactacaggacgattttttcgtacgatcaaaatagattttcataggtaagtagtgggtgatccacatgagtccttatcgttttgtgagaggggcttgtccctctctcccaaacaccccaccccctaaggtgtatgcaaacaaaaaaatatgtatttttacatgtcggtaaaataaacgtgtacggtgtgtatgtgaaagttgtacttttaggagaaacgaattttgcaagtgcgaacagtctagagggaccctcgtccaggaaaaaaaaatcttttctaggtgacagtgagtgttgtaatagtgacagtgggtaaaaggcgtgcgaagtgatgggttcgtagtacaaacaatctacagctcttttttttggataatgatctgcagctcttgttgtagtactacgataagcggataatcatgcgtaggaacgaaacaaaaagtttcacgcgaaaaagggatagctgtgatgttgaggtttggccagtgtaggccacaaattttgacaatttaaccctttaaaaaatctaattttacaaatgaatcctcatcaaaacttatttaaaaaataacccttttgttcagcgtcaaatcgt

SEQ ID NO: 50547 - DNA, 1027 bp, Oryza sativa
agttggagagcaaatcagcatgttgtacaagaacaaatctttcccgagcataagacttttaaagatagcaaagcatcaatgtttatccataatttgattacctcagatttgattgttcgaatatcgcttgttatggatattatgactgacctgcatttagtgatgcagtatatcagatgcttcctgaacctgacagattgtctagcaatacaccaagaactcccacataaaacttacttatcagggctttctatccaaacatctggcctctcctttgaatggtttgtcacttcataaaatcttggtggttttttggggtattcatttttcctgattcagaaatagccaaatatgaggggataaagtgtccaagttcacacgctctaaggaagtgcgtctgcaaaattgtgataggatgcaacagaaaaaaacaaacaaaaaggtacctgaaatgaggcttcaatttggtgacaagagcgtcaagctcttcatcagaaagaccagtaccgactcggcaaaaagaaagaaatcttgcaaggaaaaaaaaacattaaataggagacataactcttgacctgacagagcataactattaagactaacattaggaaaactgcattcccgttgttattaagatctccacacgtagttttccacagacaccgccaagtataaaaggagatggtaggggaaaagggtgttcttaccttttgggataactattgtcgtcagaaggcactgcaagaccaactaaaaactgggcaacctataacaggttaagaatggtcagcacttttttatagcattcttcttgaaaataagaatatcaccaatatatgctcccagtaaaacaagaaaaatgcagttttttgtccttgagtggttaggacagatacatgcaaaaaagtcttagaaaacatggtaggatatatagcacccttgcagcatagccctaatgtcgaaactggaacaatagataaactgtgtaattcaagataagagtatgtacacacctctcctcctcgac

SEQ ID NO: 50548 - DNA, 1420 bp, Oryza sativa
gccaacttttgttttttgaacttttaacttttaaaggaataatcctcaagatttccttttttttatggaagttccttaaatatctttggttcaaagccatttcaacttgagcaaaatagttaccgttttgatgttttatctttgccaaaaaaaaaagtggtttgtgcctatattttcttttattttgttttgccaataattgttgtcacatgaaagaatgcatttgaacaactgttctaaatatttcagtggttctcagtcaagcgtcagcatgcattgatgataattgcggacagtctttactatactaagttcaagcttcattgtaaggtaaggtcccaatttttaaaagcgtatctgcagatattgtcacataagcctattaaggttggaatatatgcactgtgtgctagacttgatttatactatacaattttgttaaacttcagagttatgttccttatatctctgtacttattcccctgtaatttgacctttgatgtttgtcatttagacgttatagtgtgttattttttttcttgagcagttatatatgttattgaattatcttttaccgtgaggttgcacttaatattcgtctgtgcaagttttgaatctaaaaggcaactgttaccttttataggccctataggtgtttgtgtgcatctgtgttgatctttatgaattgctaagaattattgtactttgataacgcagatggatttttagtgcggctctttttccatagtttaccataataataacttagagactctgtgttgtctgctgcaaatattggcgccgttgtgcaacatgtctgatgaatgatgatctattctttgctcttttgcagcctgggatggaagatggtcgcaactgctatgctgacgagcattatttgccaacactattccatgtcagtacacaaattgacttcatatgatgaaatttaaccctgttacatgttgaaaaattatatatttttttagtaaatttaaaaaactacttcctccgttttaggttttaagatgttttgactttggtcaaagtcaaactactttaagtttaactaagtttatagacaaatatagtaatatttacattacaaaatttgttttattaaattaataattaaatatattttataataaatttatcttgggtcgaaaatattactatttttttctataaacttagtcaaacttaaaacagttttgactttagcccaaagtcaaaacatcttataacttgaaactataacctgaaacggagggagtactactagtttgtcgcatcaatagcatctgattttatcagaatgctgcaattttctatatttgacaagtttgggcccacatatcatacacaaataaagtactcatgctgttgcaatcgggctcatatgtcatacacatgtaga

SEQ ID NO: 50549 - DNA, 1058 bp, Oryza sativa
gccatgagagagagagagaaagagagaatgtgactgtgttgtagagagagaaggagaggaatcttcttgaggtctcgtctttggattccagcggcatgagcgtccaaaagcgccggctttggctcccatgggcccaacggtatcctgtgttcttctgctctctgttcatcctgtgagtacacactcacttaattactgctgcttaattactttgtctgctcaagctaatcctattcacttaattaatgccagtgtatattgcccacattctctgttggtgatcagtgtaggtgttttgttactgtcagacaaaagctttttttcattcactggggttaacaggtaacagccagctgtttttaacttgcaaaactgtggttagcttttctattgacaggcttcgtgctatttggcagctcatgataaatgtcaatcatttgtgtcactgtgttaattgcatgcattgtcagcatgctgtactgtttgttttcctgcacagctaattcctgattggcaattgcctgcctgccctagagggcatggcgatgaacattttcagagtttaatgttgctactgtttactgaaacccttcttgtactaccttgagatcttcttctcctttcatccatgcatgcttgccaagtgtctatcttatcttgtttgatcatctctagaaataaaaacaaaagagcaatatcaaattactacctatctctccaggaaagatgagagaaccccaaaaaatgcaggtgtcttttgtgtctgcatgaatatactagctagctgctgattggaagatgacagattcagattcctccaacgaccagcatgctcaacttacatagaaagatgtagtatcatccttaacaagcctaccagtagtagctatttcatttatggggctcgctgaacttcttgacattttcagtactgtctggcatctatgtcgatctcatactaatgctaatttccaagttgctgtcaggctaaaagcagctgatcatctcgaccttgttgccaagtgtttggacatcaaaattaaggcactgaaactttt

SEQ ID NO: 50550 - DNA, 665 bp, Oryza sativa
tggaccggtaaatcttgagattaacgaagtcaccacgaccgtctcgctgtcgacggatacgtcacctaccattaaaataataattagttctaaatatgaacaattaagctaaacaggcacgtggtgaacaaattgatcgaccagtgtataataaaaggttacaacacataagatgccgaaaaatggacgaactaataaaaaataatttataagtttttgtatttgtgttattagtattttaaaagtaaatgctagaaaatagctagaatacagcgaaaagactctaaaattaaattaagttttaaaatttaaatttgtgtctgatatgctaataagtacagtaagggacttaatttgtatattcaaatgcagtctcattttctttttcttgttccttcttcgaaatttcagcaattttctcgtatcaagaaaggaaaatttcagcgtgtttctgctgatgaagcgttgcatgtgactaagcaaattaaagcatctgtagtttctgaagccggaacctcagagcgggtggatcggcgatccaaatggggtccgaaccccatttgacctctatattttctcacacacgctctgcatatgtggctatatattttcttcttctcctggttcagtggttgagtacgtactttaagggaattgattttctt

SEQ ID NO: 50551 - DNA, 1178 bp, Oryza sativa
ttttattaaaacataaaacatagtgcgaacaataatgtttatatatacatgtgcacgctttaatgctttatctctataatcatgtctgagagattaagtcgacgacacatagattatcacatgtgtttcattattgacgggtagttgcctactatttaaaaaataattagccgtaaatatgagcatatgtttaagtctggtacttgaacttgggttccactagaatctaactagagctacgccagtttgcaaactaaatcatgttatcacttgatcattagagtatcagactataatgatttcctgtgtggttgatcttagcctctagtaaacaggaccgatttgtttacagaagtcacaatatacagtttgaatgctttgtatcgtcgtcatcatcagtgaaggctacacgcctccaaacacaaaaacatggccacacacagagagacagagtgagacctcgcactcacactcacactcacactcacgacgaggcaggcagaaacagacgatgacctgagctagtgagagtgatgggtggggcccacacgggggagaaaaagaataggaatctagtcagccgtggggcccacgagaacgatggccacccattagagcacccacaatggtaaagtaaagtgctctctataaaacatgtacatctcagcaatatactagattaatagtaaaccatctcaatagtatgtctacatgggtatgtatagctctctaatggattgcctcgtttttctctagactatttccaggttagtgttagatcttatcatatcttatcattctctgtatggatatgcacggatgcatgttggttcggatagatagaggataggactctaatcccttgtaattaggatcaccgaaccaacacatctgcacgcatatatatctgtaaactcagcgcgtttttgcatatagtgaatcaacacgaaaccctgcgtccaccgtgacgctttcctgcatacacctgagttttatatggtatcagagcctcaaagtccggcgtgatggcaggttcctcgtcaagcactgcctccaccaatcctctctttggcgttcaagtttcagagaaactgaccaaaggaaactatgcgctctggtcggcgcaagtcctggccgcgatacgcggcgcccgtcttgatggccacatcaccggcgcc

SEQ ID NO: 50552 - DNA, 514 bp, Oryza sativa
gccgatcagcctcgccatttccgccgcgctccgagccgcgcggccgctgatacggaacgccacgccgacgccctcctcgaacgcggcggcgacacggcgacggcgaggtctgccttctcttctgcacccatctccaccacgacaaacgagcctgacctcctcacgaactccatgactctgcgccaatgcttctcgccgcggcggcggcacttcgccatggctcgcagagaaggcagcgagagctccggcgagaccttgacgctccgacccaatccggcgacggcgagctccgcctgaaccgactccagcgtgcagcgcagcgcgccgagctgccgctgttggccgtgaccacgacgccggtgacgttgagccgcaggttgggcacgacgacgccattgacgaattcgccggcgagccgcctcgcgctgcatgatctcgtgctctgaaacggcttcaagaagaggtacacattttgctgctcactgaccaccgagctggacagtatcttcacttg

SEQ ID NO: 50553 - DNA, 1004 bp, Oryza sativa
ctacaattcttaacatagtaaaggcatataaaaatatattgctgtaaatatatactattattgtatgccattctcataaatttattgtataatgcgctcccagagcggaacgttgataaccaaatattgaatcatactcatgcatttatatttttataaatccacccatataaccattgatcacatttatcaatggacgtgtctctcgtcaactctagttggaagtactcattatagtcatagtttcggcatcataaaaaacgacaccatcgtagccacagtgccatcatggccgtgtcacttttgttggaagtaccctttatggtcatatagtctcgatatcatagcaaatgacaacgccgtagccatagtgttgtcacgagttgtgtcaataagattgatataacctacaacgtggctatcttgttaactacacgcggcactactcatgttatcgtggcaagcatatgtaccacgtgttgccatcacgagtttctaaaatccgccgagagtccaccgcaaaattataaaatccacgctatctctagcagcacttactattatgataatgcagtgacagggttaattaattaatcattttatcatttgtgtggatgtgatgtagcattagtttcattcattcatctaaggggaaaaagttcacctccatgggtcagatcaacgtggttatttgtcaatgtgctagctagtgtatcaccacctaccaagcccataaacctatagcaagtgaaaatttcagtttaattgatttagttccctctttctgatgacaattaatcgtggccttatcatgttagcaatcatcatcagggatccaccatatatatagttgatgcttccattatggctagaaagtatgtttaattaaggccatgacttggagaatgacatcatgtttgaggcacccgcgctcgcttattgtcgtagctattaacatattagattatcacttcgtcatccagcgatttgccctaaatcaagtc

SEQ ID NO: 50554 - DNA, 684 bp, Oryza sativa
atttgaaagagggacagcgtatgattgatatcagttaatttccccatcataaaataagttgattcatagagttccaaatatatcctataataaatttgttcttacctcttaactatcgtctataaaaaatcaagaagttatatactcctcaataccattacacattacatagtcactattagaaggtgcactatagtttatgagaaaatgcaataaatatcattggcaaggcgcacaattctaagaaatataaaaaacaagtgtaagttccataaaatgttatcgtacaattgactttatcccataaatactatcatggttaaggtcgaaatgatataggatgaacaacgtatttaacaggacaggctgacaaaaccctacaacgataacatttatgaaacaaattagtttgtaagatgatattttacagaatttacacccattgatgacagtttttaggctcgtacatttgtcaattacattatttggattttctctagttattttttcctttgcacctaaagcttacacgaatatttatgagctactagtaacaaatgggcccttggacaccatgtgcttagcccacaggccctgccacggtggacaaagacatctggtggggcccccctcattatgtggacaaggcgcccattcgatgcgtcatccaccatccgcgctttc

SEQ ID NO: 50555 - DNA, 698 bp, Oryza sativa
gatgggccggcagctaggcccgatacacaaaaaaataggggagtaaaaatagacattatatgccatgaacgaaagcatagggatctaaaatagacttttattatctatacatatgtcagccaaagaggagggacagaaaatagacttattttagctatacacatgacagcccaaagaggagggacggaaaatagacttattttagctatacaaatgaaatagcctagagaggagggaaaaaaaatagacttattttaaaaaggcccgatgggccacccatgccttcgggccagcacggcacggcccgacagctggtaggtcgtgcctgggcaggaggtgcagcccatgggcgggccgtgccggcccgatggctgctgggccgtgcccagccgtgcctgggcggggccgtgccgggcgggccctttggccatctatactgatagagaacaaagagatacagctgacttgtagggttcacgaggggtaagataaacatttcacacgtcttgtccaccgtgggagtgcaggctggcatgccatgcatgtcagcaaagagtgaaaaattacttatcataaaagtaaaaagtttggattttggttgaaattggagatgatgtgactgaaaagttgtgtgtatgacaagttgatatgatgaaaaaggactgaaatttggatccaaactttagatctaaacacag

SEQ ID NO: 50556 - DNA, 1345 bp, Oryza sativa
tccaaaactaaaaaggatgaatagaaatgatgtcatgtcattcaagtactgagtagtgttggtgctatttagtgacatggtttaaaaatgattctttttatgctacattaaagtatattcggactcggacatacactctccatactaaaataagtttaattttatatataaatctagaagaacatgttaaaatatatccaaaatcatatcaacaatcattttatgtatatattaatgcaaacgatcgacaaataactacaaaattcaaagtataatcatacgaggggcgactacgcatattagagtgaacaaaaggcgatttggtgaggccaatctgccactctgcaggatctgagcccagccgtgcttaccatatatatgcaggctgggtgggcgtccgatatagtttaatgcggagtcatctccagatgtaagctaggagttgaaatagttgactacgtgaatttaccgttagtttcttttcaggaatgactatattacaccttccttgtacatctcatagaaaaagatgctcactgtagagtattgaattaaacaattttgtttttcattaattgattttatatactccatttgttcactagttcatgttgtttgggaatacatatacagcctgccgcatagtttgatcttggctcaatcttttccatcctcttaattagggttttgctttaattattccttttatgctcttagttttctacttttgaataaacattgaacaaaagcgttaagccgcatgaattaaatggatatatcaagtatagtcttgcgagtatatatatgcaagggagcatctttaatttagtacaccgttttcaacaaattattttaggcgtctagatatttcaaattttagaatgaaacaaagtactttggttcctcctataaaagaaatactttggttggaaggcacataccgagagcaatttgtgcaggtagagggaacttttggctgcactcgtctatcttgggaccgcctcctctaggctggtaacctgtgcgacatttgcagtgataatctcctacggtgtttctgcagtccccgtggcagggatattcatccgagcgagcgcactcatcaatatctgcatatatactgttcgattcaatggcgggtgtacaaataacttaatttgaatttttttaaaaaaaattgtattggtaaacagacatagatggcatgactagcgtgggatgcacaatagtgcaaactcaatactccctctatttcataatataacacattttgatttggtattataaatgttgctattttttttaaactaattttgtcaaacgtaagaaaagtttgactttgaaa

SEQ ID NO: 50557 - DNA, 1264 bp, Oryza sativa
aggtggacgttcactcgggtgattaaaatccttctccttgtatttgggccactccaacagaaattaggagtgtggtctcaaagaagccacactttttcgaattagggcggggggtggaggggggcggcgccagccaccctggcgccgcggcgccaggggcgggcccaggtttttcaacttgggtattcgaaattgtaagagaaaaaattttctaacccaaggtctaatagttgtataatatgtaacggtataagcatgattttataaagtcataaatagatagaattgaccataaattgaatgcgttaagcatattagagtacattactaaactattattgacaaaacaaatcaaatttatagagcacataaaatggcaaaatgataaaaaaaatcttacaatttagagagaacttttcgtttcttgatattttgaaaatgattgatcatgtcttcattcttaacttgcaagaagaaatctctttcaatgaatgtaaccaagcaatcattcaaatattctggccccatcttgcttcttgcaatcattcaaataatcaatacacttcagttcagtctgaagaagcattcaaacaataatatcctcattagtcattcaagcattgaagcaatatcctcattcaagcattcaagcaatatcctcaatcctcataattcattaatcgatatcctagtatttcctcaccggctcaccgactcaccgttgctcggttgctgtcttgctgactgctgtcgaggatgggaggagacaagttgggcagctccgcagctgggcaagagccaggaggcgtcgaggcggcgtcggcgggcgggcggtgggccgcgccgccgcgggcgacggccgaagccgggctggcgccgtggcgcggcgacggtgcgtgcgtcggcctagcgagctggcggcggctggcgtggcggctgggaatgggaaggggatgggaagggaggtgaggagaagagatagggttagaaaggaagtgggcttttctttgctattgggccaatgggcctgaaatgctgggtggtgggagggttcagtttgggcttcttttgatttttgaatgggtataagtattttttttcttttttcctatatatacatatggaatatatacttcatatatgtattttttgtgcaaaaattttgggtattcatttgaatacccatgaattgaagtgggcccgccactgtgcggcgccagccgtcggccggaggaagaaggtgggggggagaagggtgtggagg

SEQ ID NO: 50558 - DNA, 739 bp, Oryza sativa
ccagtgtacttttggaagacgattactcgaaggagtagggtcataactgctgtcaaggatgtccgcggagtggagtccccacgctgcgagcatcaagttatatagtttagctcactttaattttccgctacatatataagacttttaataatacttgtaagacgtgaatctgtgtatcaactttgtcatttgtgtaccttggccggtcatggacagggtttttatgcacattccgctttgggaattctggttcgtgaatttctaggcgtgacagtaggaaggctgctatttctgaaattttgatgaacaatgtgattcgacttgaattctatattgtttcatcaaattctgtggctccaagttgacgctttgttttgatgcatgttcatactcatctgttggatcagcaatgaaccttacttattcttctcccaaacagttcgactgtaggggaatatatatttcactggtacttttggataactcaaatttactggtgcattacagtcaagtttgtcaagcagactgaaataagggaggaaaaggttatactccatctgtttcaaaatatagtaacgggatacttgattagacaccagctagtactaggctactatattttgatgcctaatcgtatgaatgtgtatatacaaatgcgaactaaaattcgaaatgattttttattttgtttgcacctaaaaatcaaaaactggagattcatttttattggcaactctaa

SEQ ID NO: 50559 - DNA, 2178 bp, Oryza sativa
tgtattgaacgattgttgtttgattacatgggttcaggttctatttatacccgagattacaaaatatgtccttgctggacatgacacttatctctaacaaactctaagataccataagtctttgcggcagacttttgcccaaatatatctctaaggaaattacatgaaatatcctaattaatagatacaattgccttatccgagagctttatctccatcgtggcaatcctcatgaagcactttgaacgattctagaaacacccttgaaaccatcttcatcggaatcggctgcatcacctctatcggttgtatcggctatcctctgtccgatccatctcagctgatgcagactccagccgatgccttcgcagccgatgcatactatgttcttcgaatcgatctctttttcgaatccgcctcgatcccaatgtcaaacctggttcacaatttaccaaatttggtcgtcaacaaatggtgtgggtttaatgttcatgcaaatgattgctctatatcgatcgcaagggtgtagagtagtatttaataatgtaagtgcggtgcttagattatcagatttcactatttgggcttatatgccacgggtcagtagaggtgggccactgatggtgacaactcaatacgggtattcctccacattcgtatataatcctaagaaattttcgtggtatgggtactcctccgtattcatttccgatcagatatccatgacttattgtcgtaaggaactcgataatcagaggtggtctctcgaaacaccaggagggcatagttagggggtattggctacatgattatatactagtaagtgtctggtggcatagttagggggtattggctacatgattgtatactagtaagtgtaaattactgatatctatatactagaagtatatgaatgattattttcttattctttctccacttagcttatattatattttagcagagtaatccttagttctttcttctgtgtcaaccttatcgtacccagaattgattaacccacgcttagactttggtttatacaagtaatatatgaattattagaatagtactctcttatcaaatcttcccttggaattaaataaatacgataccttagattactccaaggtgaaatgctacaatagaatatccgtgtgcttgcggatcatatctgtaaccataaatataccaagaatattttagtgtcagcactgggaattatatttctagtaatatcgttaagaaatatcaacaattatactagttcagaccactcgcaaggtagtatacctaatctagtttatatgggattatagaagaaaccacggagtacaacagagaacaacaaaacttcgagattactgacgagatccttgtcgtgagaacttcgacgagatctattgacgaattggcttaaagtcctctggatttattttgtggtggtgggtgtcttgcactaagattcagtgccctgtacctctctggggtgtctatttataccacatatcatcttggtctccaagtagaacttgaagacaacagaccccacacgatatgacaacatccttatcccctccgagtatgactctgatatctcctattcgtagagattatcccctccgagtatgactctgatatctccgattatttccgtaagaacttatcaatttccttaactcaataggatcatttccatatatttgaggatatactatatccgtatatctcttgactcctaggatagaaggtatgccttattataccatatccgtatatctcttgactcctaggatagaagatatgccttatccgaaccctgacaattatatttctactattgtcatataaaacatctgcagcaatgcatgggatcccatgtagttaattattccatctgttctttaatagatgatgccgttgatttttagacacatgattaaccattcattttattgaaaagttttgtggaaatgtgtaagatatcaatcatgcttacactactaaaaggacacatataagtcagcattataggtgctggaatagctaaaaccagcgaaaaccggcacctatagtgttttccccaccttcgcaggctgaaagtacaaaaaatggtacgagtataagtgccagttgtagagaaaaacccttttttaaaaaaaaattgacacctttatt

SEQ ID NO: 50560 - DNA, 1286 bp, Oryza sativa
gccccaaacatataagtgctgttaaattggaacggagggatgcgactgatggagtagtatactgtgacgacctgggttgtgctatttttttttagtatagtttttccctttgacattgagatggcataaccgtaacagtcgcagttttcctattgtacaatattaataatgcagccatgcatgcgggcaccaccaacgacgatttccgtcggcgaaatttgcccttacgacctccgacgacgactttgcagaggccttccacattgcagccgtacgtgccgacggcccgacgccatgtatgtagctttccgtttcctaactctgatcgcaacatatggccccgttcggcagtcctactaagcttaggcacgcgaaacgaggaaaccattgatgtttgattaattattttaaactcatgaaatggatatatttaatattttaactcaaattctatataaaatatttttcacagaacgtaccgattattagtttgaaaagtgtgttaataaaaactaggacacaatttgtattttaatgaaaactggaacatactaattattttcacttcgtgcatgtgtggtagctacgtgcagtaaataattgactatactcgctcctctgttgcatattataagttattttttattttttttcatatcaaacattcttaaaattgattaagcctgtgaagaaaatatggcaatatttttaacataaaaacaaaatatcagaatatattcaatgctattttatttaatgaaactaatttgttgttgtagatttcgctaagtttttctataagcttagtcaaatctaaagaattttaacttaaaaaatatcaaaacggcttatgatataaaactgagggagtaatatattttgcaaacccctcattgagtatgatctgataatggattattacatgtggcgattaacaagtcacttgataagaagtgtaaattgtctttaaatgaggaaagcacagggcatgttctttttacttgtcctttggctcattttgcttggaatgtaattgccatggtgttgaatttacatactgtctctctatctttctgggatggtatgagagctatcaaaacaaaaatgaaatctcaagtgggtatggtactgtttgctgggatgttgtggggtttatggattacaaggaatgagtgggtgtttgaaaacaaactaatcaaaactcctttgcaagttgtctgtacatgtctctgtccctgatgcaaagatggaggctgctactaaaataaaaaactgcgctgacttgg

SEQ ID NO: 50561 - DNA, 547 bp, Oryza sativa
tgtgtatatgtttctctgaacctctggatgtaatcttgcgcggtttcatcatgcctctgcctaactgctgccagatcggagagcttcatctcatgggtcccactgtagaagtagctatgtaattgcttctccaaatcgacccaaccttgaacaaaattgtaaggcaatgaagaaaaccatgtgaatgctgatccggacaaagacaaaggaaacaactgaacccttaaagcgtcaaccgccgatgcctctccacactgagccaagaatcgactgacatgttcatatgtcgaaacattgttctgtcttgagaactttgagaaatcgggaactttgtatcggtttggcagtggaaccctctcaaaccgctcagggtatgggtgccgatacaaatttccggtattctttggcttaagtctaaactgttccctcatgacatctgcaatcaagtcggcccatggcctctgttgaggtactccttgcacctgttgttgtatcggctcgaactgattgagttgaggaacatattggggctgaggtaatcctcctt

SEQ ID NO: 50562 - DNA, 1940 bp, Oryza sativa
acatttgtcaacggttttattggataaatttcataaaaccctatattatatattttgcgttcaatgtagaaagccaccgaattatggattgtagcacataaaacccgttatttaaattctaaattaatttcagcatatcttaaaaacaatatttttcatagcagtgaatagtaaaaccaacaaacctcaaacaagaattcaacaattaaaattttatatagactccatattttaaaaagttagtaaatgcatgttcatgagaattctggaattggctgggttgttcagtttaagaggggaagcaacttaacatggaaattcatgaaatatctacggcaggctcctaacacagcgtagaatcttatgtattttcctagacttctctctcttgtcctatagtttggagtttgtcaagttctactccatttatacagtacgcatcctaatttcatgaacattctaattcaacagagtgacatggattctaccagcaaacactaaacatatgcatacttatgaaatagtagaacaattttcacatttatttacattttttaaagacttctaatattttttcactaaggtggccaagatctcattcttctggcaattctgatatcaatttcaatgctctgtctgcacttactgttcatctacgagtaatggttcacctcccttagcgccatctaactaaacgagtactggttcacctcccttagctagccatcgaactaaactccacaacgaaccaagcatcaagttgatcctctacatgacttccctatctactcccatgccaatcatgcatcaagaattcaagcagacaataaaatttagattcttctgtaacaggtgaatgaaaatttagattttcgtggcacgcttttcaaactgttaaacttattcaaatccattttagttccgaatctatttccgaatccatttatatatcagttcgtacgtaaactatatatatgaaagttgttctaaagtatcatattaatccattttttaagtttgtaataattaaaacctaattagtcgcacgttattatcacctcgttttgcgtaaaacacttaatctttatcttcatattcatcttcatctttagaagattcaaacactgccaaaatataattcctattgcaatgacagacagattaactcagatgatccatatactgctcggcctatacattattcagaaaggtccagctacaggagtgaccacacttaaacagtgaaactatatatgagaatctgaactacagttgattaattgagactcttcagtcaattcaattctcacctgtcagatttttaactggataaataaaaatgactagtaattgggatgctataaaaaatgggcccaactggtagagctagtggcatgtacagcaacaatttattcaattttcacgcagtgacagattgcatttctgctgacataatggcatatacttcctccgtccctaaatatttgacgccgttgacatttttaaacatgtttgaccgttcgtcttatgaaaaaacttttgtgaaatatgtaaaactatatgtatacataaaagtatatttaaaaataaatcatatgataggaaaagaatcaataattacttaaattttttgaataagacgcactggtggagaaatgctttttagtcccggttcgtaaccccccttagttccggttttccaaccgggactacgaatccgggactaaagatcgctatctttagtcctggttcaaataaccgggactaaaaatcaatcccggttggtgttaccaaccgggactaaagtttttttctttttttttttctgcttttaatattgaatattgatttcacaccatcccctcccatatcgaaatcatcacatatcacagaacatctccaaatcctcaaatcctcaaacaaatcatctccaaatacat

SEQ ID NO: 50563 - DNA, 5295 bp, Oryza sativa
  unsure (1)..(5295): unsure at all n locations
gattgagagctctctctataggtgccggttgtttcaaacggcacctgctaagcggcactgatgaaaccccaagtcattgatgtaagtttcacaaccgacatctttgatgtgcacgcgaggcaaaagaaaaatagcttgatgcattagattgattcgactcgatgctttgagctcataactgaatccgaaatcatcacaaatttaattcaaaaactaaatcctaatccaatcgaaaatcacatgatcattccaaaataaatcacaagacaagagacaatccaatcagaaatcacaaaataaatcacacatgagatgagaggagaggcgaaaattacaaaataaatctcacaggagatgagaggagagggacgggcgagcgggaggccactgccgctcctagccgaaccccctcctttcctcctcgctgctgtggaggtcctgagctcgggggccaaatcccgcaccgcggggttgccggtaaccagccacagcgccacgaagatgctgagagggagatggagaacgaagacgacgacggcaaggccgaggaggcatggcggagacaggtgggaggatgtagcgggtaggggtggtaatgaggaggtaggcgtgcggcgacagtaggggcgggtgtgagtgaggcggcgggagcaagtgtggaggaagagggaggaggaggaggangagacngaaaaggaggtgtggtgataaggatgactagacaagggagcagataaagtggttggggggcccgtttttctataggtgtaaatttaaaaaaataacaacacgtatattagtgcgtgtactgtaaattgagacctataatatattatagtgtcgggttctttaaaaaatcggcactaacaatatagtggcatgtttttatttaaaatcgacatctatctctccacaaaggtatttgttctagccgatggcgctatgccgaccagccttgggtgagaaaaacattattgatgtcgggtttagtattttctgtatatatagtctgtatatatagtgctgttatttttttttgcatttcggtagtagtgggccttttggccacctatgataccaggaatactagtttttttgaagagagattaggctgcattcgggagtgctagttcccaacccttctcacccgtttttcatgcgcacgcttttcaaactgctaaatggtgtattttttgcgaaaaatttctatacgaaagttgcttaaaaaatcatattaatccacttttaaaaaaattagcaaatacttaattaatcatgtaataataggtggttcgttttgcgtgccgggtcctccgaacacagtcccttgagcgactacaatcgagtactgtttgaacacatcagtaagatcgaaagtcagatccttacccgcttttctctcctggtcaacactttatttctaaaattaattctcaagtggatttttgttcagatttttttttcataccggtattcacgttaaactcctgtcctacaatttaacaacggacctacttttattgccttttttctattaatttttgacccctttgccttgaacaaggcaccaccttcaagcaaatgaaggatgttagaaggtagtggaagcaagaggaaggtagtggaggtcaggttgcacgctaagactgtgttcgggaggcacgtaaaacgacctatacattatgattagtaaagtattagctaaataaaaattgaaaaatagattaatatgtttttcaaaaacaacttttctatattttttcaaacaacacatcgtttagcaatttggaatatgtgcacgtagaaaacaagggaggtgaagttgggaaagtaaacttataccttgtttagttccatttttttttctaaaaacgtcacatcaaatctttggacatatgtatggagtattaaatatagataaaaaatcaattgcacagtttgcatggaaagtgagatgaatcttttgaggctaattagtctatgattagccataagtgctacagtaactcacatgtgctaatgacggataaattaggcataataattcgtctcgtggttaccaggcgagttataaaattagttttttcattcgtgtcaaaaaaaaccccttccgacatccggtcaaacgtccgatgtgacacccaaaaattttctttttgcgaactaaagacacccttaagaacgcaacatatgttggaggttgagaagtataaaaaagtgcctaaggtagtaaggggtctaattgaaagtataggatagaataaagaggtccaatgggaagccttggtaaataaatgtgtcctatatcttaaaactgcaattcgttcttattttttaaaattataatttcaaaattaattccttttcccatcaataagtacttactatgcaaattgcagtctgcacccgttcactagactggaggtaggaatgacgtacatatatacattgagaaatattaggaatttaactttgaagggaagaagcatatgtatatggatataaataaacgagagatttgcaaaatatatcaagtcacttgtttttgtatatcaggcaaatatattacccggctttgtaaaaagcccagaagaaaacaggttcttacagagtcttacaaaagtaaacagctaaaacagggtaacaaaaggctttgcgacacactggggacatccagctttctatgaaaggtgcagaccatcaaaaagtactaaaagccccctcactaaccacatcatgtatatacacaactgggacagaaaacgacacaaagggcctgtttatttggaaaaatattttacccttgcacgtcacattggatatacggtatttgaagtattaaatgcagtctaataataaaataaattatagattccgtcaggaaactgcgagccgaatttattaagcctaattaatccgtctttagtaaatgtttactttagcaccacattatcaaataatgacgcaattaggcttaaaagattcatatcgcaatttcctggtgaactgggtgattgtatttttttttacatttaatactttatgtatgtgttcaaatattcgatgtgactatgtgaaaaatttggtttgggaactaaaccatcccaaactctcgtaaggtacccagagtcttcgggcagattgtcaaccgcgcgccggcaaaccatccagaatgagcatgctttctcatggaaatcagcgcagttttttcttttagtagcagcctccatctttgcatcagggacaaagacatgacagacaacatgcaaaggagttttgattagtttgttttcaaacacccactcattccttgttatccatagaccccacaacatcccagcaaacactaccatccccacttgagatttcattttggttttgatagctctcataccatcccagaaagatagatagggacagttacattccaaaaataaattcaacaccatggcaattacattccaagcaaaatgagccaaaggacaagtaaaaagaacattccctgtgctttcctcattcaaaagataatattgtcaagtgacttgttaatcgccacacgtaaggtaatccattatcagatcatactcaacgaggggtctgcaaaatatattactctcttagttttatatcataagccgttttatatttttaagttaattttttttaatttgactaagcttatagaaaaacttagcgaaatctacaacaacaaattaatttcattaaataatatataacattgaatatatttttatattttgtttttataaatgttttaaaatattgccatatttttttacaagcttaatcaaatttaaaaatgtttgatatgaaaaaataaaaataacttataatatgcaacttataatatgcaacagaggagcgagtatagtcaattatttactgcagctagctaccacacatgcaagaagtgaaagtagagtacataggccatgttcttttcctattaagatacaaattttgtcacagttttcattaacacacttttcaaactaataatcagtactatccgtgaaattattttcattgaaatagagttaaaatatcaaatagattcatttcatgagtttaaaataattaatcaaacatcaatggtttcctcgtttcacgtgtctaagcttaagattgttgtaatttagattattgaaccagattactataagctgaattataataggccgacatataataagctgtgagctgtttgttttcctggattataagctgtttgttagttgttagccacccaataataaaaaaagcatcttttgagtggattagattatagtaatttgctttatagattataataatctatcataatatgttatcggtttgttttagcttatttctaataattcagattataataaccctaagctgaattaaacagtactgtgaatcaaacagtactctagaagtactaccgaacggggccatatgttgcgatcagagtttggaaacggaaagctacatacgtggcgtcgggccgtcggcacgtacggctgcaatgtggaagacctcggcaaattacggctgcaatgtggaagtcgtcgtcggagctcgttaggacaaatttcgccgacggaaatcgtcgttggtggtgcccgcatggctgcattattaattgtactatatgcaaactgcgactgttacggttttgaattgccatatcaatgtctttgggaaaaactatactataaaaaaacggcacaacccaggtcgtcgcagtatactactccctccgtcctatcttaagtattttatatgttttcgtgaccaacatttgaccgttcattttatttgaaatttttttattaatattattattattatttgatcgtaaaacatgaataatattttatgtataacttattctttttttataaatttttcaaataagacggatgatcaaatgttggatagaaacccataattttttttaataaaattttcaaatacatccctgttcttttctccaacaaaagttggattaacttttggatactcgtggcacacttttcaaaccgttaaacggtgtatttcgtgcgaaaactttctatatgaaagttgttttaaaatatcagattaatctatttttcaagtttataataattaaaactcaattaatcacacgttattaccacctcattttgcgtgaaacacttaatcttcatcttcatcttcatcttcaggagattcaaacaccacctcaaaaagttgttaaatttggacgttaaatttgttttactcaaaaagtcgctaattcttatt

SEQ ID NO: 50564 - DNA, 1037 bp, Oryza sativa
cgctttgaaattattttttttaagtttgactaaatttatagataaaatagcaatatctaagacattaaattagcttcattaaatccaatattaaatatattttgataaagtttttaataatatgtttgttttaggttgaaaatgctactatttttctatgaacttaaagaaatttaacttttaaaaaaatcaaaacgacttataatacgaaactacatagggaatacgtactcttgaaagcatcctcagctttcatgttcttccgggtgcagtcggcgcacttggccgtgccgacgacaaccgacgccgcctcaccgccgacggcgaccgccatcaagacggcacaaacgccgaggagaactagtcctcgaggagcacctgccattgctgagctaatcctagctagctctgtgtagctaaatattgctgatgtgtagagatggatgaagtgaaaggtgaggcaaacgcgcggtttatataggcatcgatgaatacaaacacagcttgcttgcattattgatccatcaatcgatggatcgaccagctagctatgagcaaaaagggccaatttggcgccgaatttgcagatgggcgaattaaggccgtccaaactgaatgatttgatcacgtacgtccaatcctctctgcagcccagctacgagaaaataatgatctatccatcggttggtatacgtaggatccacgcaccgctttatttatgcatgcatgtgaaatcttaacagcaataagtacaataatcgcactgcgtcttaattaacttcttgtaaactgagtctgagagatgattaattgatcaggagtactacaatgagccgtacatcgtatctgcagtatatactttgcaaatgcattggattgttattggattggatctttgaatatatgatcgcttaacacatgcaaatttaaaggtaatttattgtctgcatgtatatatgcacttagtacacatgtccagcacaaagtactgacagataaagattttgaacatttgagattaattgacaaagcaggaa

SEQ ID NO: 50565 - DNA, 819 bp, Oryza sativa
actttcatatctttccttattttcccatgttatttttccattttcccctctcacttcttgaccttttcctttcttcaactattttctcttttctccacacacaccaactcgtgcggccattggcccttcttccattcctgctattctcgctccctcagccgtggcacgtgttcacaagccgtgaccagcctataggccactatcacacccattccgggccagcaaggcctaccatctgattgggctgtgtttgggctcaggcattggcacgtgggtcggcatgtcacaaaatattttagcagccatgtcttaagggtattaacttgatgagccgtgccagatgatctatttggctctaccactatcttatattatgagatagaagtagaagtagattagtatattccttccattttaaaatatagcaacctttggaattttatgttgagattaagaagtgtgtactagaatcgaatagggatgagtgttgagatgagaaagttggttgacaaattaaacgaaagatgattgatgcgtttagaggagtgggtaggtgaagaattagttatattttaaaataaatttgaataccaaatatagctataatagtattttaagagggagggagtagatcgtagcaggtggacaaacacagctctgctccatgctatctataaatatacgtaccccccacagacaattggagctagcttattgaaggaaactaaaggaagaagcagctacttctactcatctaagaaaataaattcctaactagttaatgttgtacaacttacatgcctccatggcattctggct

SEQ ID NO: 50566 - DNA, 4755 bp, Oryza sativa
ccgcgtacgcccgctatcccatcgccgtgtctccactctccattcgggctccctcgtccatctagctattggcgctgccctccctcttgtgtcatcaggcgccagcgccggcgccgccgcactccattcccatagccagccgccggagccggtgtctcctccatcctcccggtcgggctaaccgccacgacattggaggggaatgggggttgtcagatcccgccgttccctaccttggggcgactggatccgtccagcgccccatggtcctcccgcagatccccattttcagtgataaacgggtatttccttttaattagtcattcttactttgtgcgcagtagctagcatgattagtttgatgcgtttatgctcaggtgcgagggccacacctccaggggtgggcaggcttgttgtacttcccctttgcggcggtactcattctcgctgaccctggcatctcctcaatatacaagctttacaggtttggtatattaattatcactgctttggatcttaaataactccgacaaatctttttaacttaattattttgctgatcaaaatgcatttgttatcagttttcaagaaagatatataacttgattcaagaatttgttaatcctgtacaaagtttagattttgactatatatagtgcatcacggtcatctttgcttgcctgatcaggaaacgtagacagggatgttactccactagaagtcttgaacataccttataggtgttgagctcagcagaaaatttatatgttgaactatagaatttggataattacttactcagactactaaattaagtatataaaatttgtggattaatgttcattccaatccttttaggggcatttacaaatgcagagaatgcaagtacttcatatgttctgaatatatgcaaactaaagtattttacagaaattcggtatgagtatattaattcaagttggcatttttatacttactgatttgcacttttaccattttgtgtccttatcttcttagcctgaaataaattggactttaattaatgcaatccatctatgtacctctgaagagcatgcatccagttgagatcactgatcattaggtgcggaaaatcttagcacttcttttctctgaaataaactcctatttccgttgtcaaaattatatatatagaaaaatgctttgcaggttagttcctgtagatcttgtttcatcatgtactcagtggttttgcttcttgaacatataataattctcggtttctatactttcctttgatcactaaaaattccagaagtgatggtggcaaacgcatttggataagataaatcttaatttgggctatgatggagtgagtggtctctgttgtttagctatgttttagctgcttaatgttctgtgacaaaatactttatgttaagttcctgtattgcaatttagacggtcttgtcttaagggggcataataatctttagttcctgtatgatgaggtgatctaatcatctaaggcttcctgctgcaatattgaatagtagtgtaaaggacattgaatgtgggcaggttagtatttttgaatcttctagtatgtattcacatttttattgcactactaggccacctcagtttatagattttagtaaattagcaatatacacaatgaaaagaaaactgttgtgttaaggaaattctttatttgccatccagaatgaaaagaacatgaggttcagtgcatccagttaatgtgttgcccctttgttttttaagatcaaactagtatttcacagctgagtttaaagagggaataaattctgatttactcggtatacatacgctattttgtttggccaacctgtgctgctttttacccatgcatgctgttctagttgcggcatctgctatgctctgattaactggcacagctactctggtatgattagctattttggactttggttaggattggaggctgtgctgtttggctattggttttgcaaaccatgactattagagggcagcaaacatctgattatacactaattgcttttgtatttccttttctttaatcttatcttaacatgcactgttcaagaactaatgcatgtacctcacttgttttcagattcctcatactggatagtgtccttaaccttggtggatatggggctgtagcatatgattaggtctgaactgctaagggtggtgctactgcctctggtttttccttagttcaattttatcacctcttaatcaagtgatttatgtgaagccaaaaaggacttgccacccttaggatcgtcaatgtacaaattctttcttagcttttttttttttaattcacaatcctctgttaaaatgctgaggagaatggtcaattggtcatgtacatgatgaatgaatgaatgaaatgaatcagacatttgagggtggttgtcattgtgaatgtcattagctattgaaattggtatgctcatgtaaacaggtgtaatggacaataatgtgaaatagttttctttttaatggtagcagagcttgctgtcagacagtgtgtcggcaaatctacttttttcatcaactcgtctgtcggtaaagatgtttctgtcgctagacatgtctgtcgttgaaggtaatataggggtcagttcatctgtcggtaaagatttatctgtcggaaaagccctttgccgacaggctttcgcctgatacacgtaatctgtcggaaaactctctaccgacagacaggatgatgctaaaggtggtatttaccgatagatgagctgttgcagctttcaggtcatggtgtagtgacttttgtgaagtatgtaaaactatatgtatacataaaagtatacttaaaatgaattaaatgataggaaaagaattaataattacttaaattttttgaaaaagacgaacggtcaaacatgtcttaaaaaaatcaacggcgtcaaatatttagggacggagggagtatatggtaagacttgtttgcgactctagggcagcagagattatcttacagaacatatcccagacgaccgtcagggagcaccattggtaccatcattcgagctggtgctggtcctctaccatatatcatgggctgtaacgaaaatgtccatagagacaaatacaatgtaacagcagtggcggatgcagacaaagcatttgaaaacgaagaaatatttgtgaataaaatttttacatgtgtgttcttagaaatctaaaagcaaaggttgaaaaataaacttcaatgagaaaatttcaaaatcaactctaaatttaagattgaaaatttaaattttggctgataagcataagcgaaaagatgaggcttcaggattcctagcattggtattcggagttacttaaatcatgtttcatagaatttatataaagatgtgttaacaaccaaatttggaatcatcggtgtcaggaaagaagattagatcgaagcgaagcggaggcggagatcgagttcggaaacagagcaagaatcggctggagtccagatcggctacgattaggatcggctgggtctgagtcagactaggtaagccggtacagccgattccgacaatgcaacttgatgtatgatattgggttgaattgaggcgcttcaaggtgattgccgcacatggatagagtcctgagaaggcaattgtatctattaattaggatgttttatgtaatctccttagagatacgcttgggcaaaagtctgccgcaaagacatatggtatcttagagtttgttagagatagtagtcatgtccgttatggacatatcttgtaattctcgggtataaatagacccgagccctatgtaacttttaacacacatgttcaatacaatttcggcgcatcgccacccttttgctttagttttgtttcgacgagttcttactttcaggttgagctgcatcggtttcgatcttcaacaagaggtaaaacttgttatgacggcttgtattctcgggattagtgctttcatctttatgacactctaatcttgtttatgtaattcgtcgagttatcatatatcttacataatctctggcaatatcgctatctaacctacaatcggctaagatctatcgaagagggcagccgattaggttagattttgacgttgattcagattatataagatatctaccactctatgaaacttccagcggcttgatttttagatattgttcttcttttcatatttaatgctgcatcagttgagtttgatctattaagtcgtgcttagaatatcaatctctagcctgccttctggttgccgattagggtagcatcagagtttcagccgatcttatctgatttaactatatttgctctatatgcttcattgacatgttaaatatgccctttatgtcaagatattgtggtatctaagtacattaggcctttgtttgatatattataccggttttaatatcctgatatagagtagtatcggagtattagccgatacatgctagatctatctaatgggctatgctataaacatacatagtcctattattaatatatatttggatctaagtgatttatacggtctgggcatagtgaccgatctatcccaatcacttgatttaagtatatatcgatataagaactatatattggaaatatctacagccgatggaatagatttagttgtttattgtctatttacaactgccgatcgattcacatatgacatcggctcaaagataaatggtatgtcatcggcacctagtcgatcaac

SEQ ID NO: 50567 - DNA, 695 bp, Oryza sativa
gcgtggcgcggatccggccatcgggcgcctgtggatcgagccattgcggggccggctcccgcgaatccggctgtcgtggggctggcagaggtggatccgtccaccgtcgtccaccgagccgcttgcccccgcgccctaagtgtcattcgccactgtcgtgtgccgcgctagctgccgcctgagcgctcaagaagccggagccatccgccgtccaccgcaagccgtcgcggggccgatgcccgcggatccgtctgttgagggcccggtggcagcggatccggtagtcgcggggcccgcggaggcggatccgtccacgccgtccgccaaggtgccatccgtcaccactgtgcgctgcgcccgctagcgcccgccgccaccaccatgcgccgctaacaccgccgccgcttgccagtgagttagagaggagaggaggtgagagtgagaagagaggagagtataaggttgaaataatgaggagaggaagtgagaaaggatagggatgaaaaattttgaagtgttgaggagagaaatgaggaggtaactcagactttgggcggatccttaagaggctgtatgtgaaaatcgattttcgtatgttgttgcataaaaggccccttaagttgtattgactgctatgtgtctacgggagttattttaaagatggcaatctatttcatggattgatagtcttactc

SEQ ID NO: 50568 - DNA, 675 bp, Oryza sativa
cctgtttaaatgattgattttcacgggttattggttataggcaggtggaaaaacatccatatatataaattatggaccacctaaacaaacggttttttatgtaccgatgagtgtcaaagtctaagtttagaatttaaactatttagatgggtcaaaaaaaaattcctaggagcgtttgcagcagaagttccaccaaatagggccccagcgtagactggtaattgggacggatggccaaaacctccaatattgctgcaagacaaacttggctcatccccttaacatagaactgtaccattatattatataggaatatactttacatgttcagggtattaacattggggttactggaatgaactttgcttcaagggttatcattcatgaaaacaaaattttattaatcagaaaaaatgatgatctttcgatatttagaatctactatctgggatatggttatgataagtagggatatatgactgaaccaactctgctgtgtggaggatgaggggttcccagcccctctctcccgtattccacgtgcatgcttttgaaactgctaaacgatgcgttttttaaaaaaagtttctgtacgaaagttgcttaacaaaatcatattgatccatttttaaaaaaaaattagctaatacttaattaatcacgtgctaatggacc

SEQ ID NO: 50569 - DNA, 936 bp, Oryza sativa
tagggtttttatcaaattgcctggatagtttcaatggacaaatggatcaactggagcaaagtattggcactagtaaccgggaacatatcctatgcacactccgtgcataccaactagcaaatgccacgaaaattctacaaaacattatacacatacttcgaataatattacacctatatgtgaaattttatcttcaaattcattatattttggtcgtaataaaaaagacaaaattctgacacatttttaattacctagaaaactgtcagattttttttgttacggctaaaatataatgaacttgaatatgagactttatatatatgtgtagtactaataggagtaaatgtttaattttatagaatttttcgtgatatttgttagttggtgcgcacgagaaacatgtgtacatagaatatgttcctggtaaccatatatgatctttagtgagttacaaatatcctaactattttcatatttttcattcgtaggaaaaaaaacaattctttagcttttgcatgtcagtcgtacatgcataatatatataaacattacactgttgatatatagtaatatatattcatctcaagtgagcattcgttattattttctattataagttgataacaacaaaatcacaagtcaaatgtatttgttatcgttgctaatgagaacttatgatctttgtaggcataagcctgggattttctttcctgatagttgctgcactttttactctaatgatgctccaaaagagaaaaattaatgagtatttcaaaaagaatggtggttcaattctacagaaagtggacaatatcatgattttctccaaagatgatctaaagaaaatcacaaagaacaattcacacgttattggccaaggaggttttggtaaagtgttcaaagggacgcttgaagataatacaatggtggcag

SEQ ID NO: 50570 - DNA, 873 bp, Oryza sativa
ttttcccagaaaatttgagtgcattgcatcaacccttcgctcattcatcttctcatacattgcaacaagaaaaactaatattataaaaaatcacatgattaggttacgatttcgatgtcaatatagttttgaaaatgataaggtgatttttttggataatggattaaattcctgcctttacttcaaataagctacaatcacttattacaaaattctctcaaagagagcaaacattcagaccacttcatagcgacgggcacgtccagcaagaacagatccaatatacatcatcaccatggagaccaataccatgtagacttctcacagcatgactgccagcaagcaccacatgtaggcgtgagcgttaacgaaggaacgttaacatagagatcgaactaagaaggcaggtagatcgccattactcaccttgcagcacgggatgacttaatgttgacttccccaaccatgagtggcgttcgacggttggagtccgatgatcattattggtggcactagcattatactacctctaatgttttgacttttttctaagttaaacttctatatatttgatcaaatctatagaaaaatatagtaacattttcaacacaaaataaaccaatttaataaaaccaattatattcaattctagatttaataaaagcaatttggtattgtaggtgttgctatatttcattataaatttgattaaaattaaagaagtttaacataggaaaaaaatcaaagtgtatatatggtaccaacagcagcagcagccgcaatagccatcagagggttcagggtatcgccgtgtcacaccctgaagttcttctcccaagcctaaatcattttaataaatgaccccaagatgat

SEQ ID NO: 50571 - DNA, 918 bp, Oryza sativa
ggatctttgttggatttttttttgttgatgtggataatgattttttttggaagttgattgtgcgattgtgttcgagttgattgattcaggggtgattgggagctacatcgaacggctttttttatttgtcttggggcctcaaagatgccggttttagaaccattacctttgatttctctcattagtaccacctactatgtgccggtttcccaatcggcacctgtgcgggggttttcaaccggcacctatttgtgtttatgcagtagtgttaaagtatttttagtgataaaacaattcgcattaaaataaataataattaccaactttttgagtaagacgaatttaacgtccaaaagtcaatgaccaaggtactctctctgtcccatttgaagtgcaacatttgatcatccatcttatttgaaaaatttatgaaaaaatttaaaatgataagtcatacactcatacataaaatacttttcatgttttaccatctaataacaataaaataatattaataaaataatttcaaataaaacagatagacaaacattgaccatgaaaacatatagggaaaatttcgtttctacccctactctgatctctaatattgattttacccctactttttagagttttcgtttttaccctcacttttttgaactgaacgcttgttttgcccctactttggatggtgaagttaacggtgttaagtaattgataaaatgacatttataccctctcatgtatgctcattaatattgtttttgtccccattttatgcatgtagctttagaactttatttttttgagtatatttcaaattacatgaagcacattgactaatatttaaagggaacagataattacattttacaaaatgttgtcaaatttttgtttaagttctatcaaaatgctgaa

SEQ ID NO: 50572 - DNA, 506 bp, Oryza sativa
atacatgtaatcgcacgacttcgatcacattcaagaatttcatagagctaaagtagcttggaatgtgtatagaagctttttatttgtatagtaaacactatatatctaatgatctaaatcgtttgttgacaagctacaaagctaactaatatttgcttcatcatcaaatgaaatgtctgctgaaaattatattgtcctgatcaatactatttatccaatcctgcattgatgattttatagacaattttctccatacgatcagaaaaatcgtaggttgttaaatggctttacgaagagaattcgacttaagaaaataacataatattgccatgactattcatcccccatggtagccaaatgaccattttgcttgccgtttctatttttcttcttattttctttctattgttagatataggtacataacaatcatgacaattttggtaatttctccccaaattttgaattagtaaataatataaaaaaataattgagactctgaacca

SEQ ID NO: 50573 - DNA, 1482 bp, Oryza sativa
atcaatctgcgcactgcgacctcaaaggaaaagttttgcttctcacctgtcctcgcttttatacagattaaattgaaatctaaataaacacccagtgatttgcaggatgaaaacatacacatgtatggagtttatgtgacggctaggagagtgggagagtggcacagttgcttgcaagacatcttttcccttttgaaacaaaaaaaaaaatattttatatagtgcaagatatttggtcagcgagcaaataaaaatggactagctctgcactttgattaggcctttgcttttatatataaactctttttagcattctttttgtactgctgcttcggagtgacatttctcattcagctctgcacattatctctgattttttttttcagaaaagttagtaattatttttaaggtaagctagccatatgaagttttaaaggtataacctctattattaagtattggttctctctggtaaaaaaaatacaactaatcaatctgtgcacagcgacctcaaagcaaaagttttgcttctcacctgtcctcgcttttatacagattaaactgaaatctaaataaacacccagtgatttgcaggatggaaaacatacacatgtatggagttcatatgatggctaggagagtaggagagtggcacagttgcttgcaagacatcttttcccttttgaaacaaaaaaatatatatattatatagtgcaggatatttggtcagcgagcagataaaaatggactagctttgcactttgattaggcctttgcttttatatataaactctttagcattctttttctgctgctgcttcggagtgacatttctcattgagctttcagcgctgcagttgtcaaactattaaagcgacttgatagttctgcatcatgggtagtgtgcctttagactattatgtttttttttttgccttttctgcaagcttagttcaatttttttatgaaattgtgcaagatgttaggtcagatccatgcttactattgcacaaaataattttaaggcacctcttatatctatatttaggagtatccgtcactgcagttttttgctttagtgccatactgattacttcacattaaacatgcctcgtgcatgattaatttttgtattgtgcaattagtattcagtgcttctaaaacattgcgtattgatattggagtttggcttttgatattttatttatggttgctgtataatgtgaggctattactacaacatgctcccacaatttcatcatatatggctattcattcatgatactactgcttgtctgtatatacataccgattatcttttgaatccattatgaattctggagacattcatttgctgtatatacatagggttttgtttagtttcatcttatagtgtataaagagtagaatcagctgtatagcaatttaatcatgagaccagagggaggttcaaggccctggtaaagaaacattttctcatgc

SEQ ID NO: 50574 - DNA, 2610 bp, Oryza sativa
cttgatgtcaaggtaacatgatatgaattgatcactttgcattatgaacaccaataacttggagttgttcttctccttagcattgttgcctctgttcttgcaactgagaactgtatgcccttgtttcgatcagtggtttaatgtactatggtccctagcttagatagtcatgtatgaatttgcgactaaggaatcatgcatacgataaaacttggtggaaataaacttgaagtttaaaccagaatgtgaccactagtgttcacaagtgatgaacatgaagattaagtacgggcacgcaaaacgagaaaaccattagcacataactaattgagttttaattattttaaacttagaaaattaattaatctaatattgtagataagagcaacttctatatagaaagtttttgcatgtaatacaccgtttagtagtttgaaaagcgtgctaacggaaactgaggtaaaatttgtatcttcatttgctgacaaggccgtagattgaaaagcatgcaccagtggtatgtcaaattcttgtgcaaatttggtcgcagctcatacatcatattgttcaacatttctctttaagttgcatacaaattcagggctagagaaatcaacatgctatccaatgaagagacagtaaagctgcacatcatattcctaggtcgttcaattatttttctgtgcatgattacttacatccatgttcaaatgatagtttatttgagatttatacctgaaccgaagtttatttgagatttatacctgaactgaagcccgtgttattgtgccgtggagccggagaggaaacttatgcaacctgtgcagaactaactataggcctaaatgcatgtgttgagaatacactgctaatagcttgcggagcagtctagagatcaaggccgtagtgcaaaatgttatgaattctagctgcggtattattagcagtcctctaattgatgctgtaagcttcaagtgaaattggtggtcaatgcaatgaaatactctgggatccagttctgtgagggtaaccaatggtttttgccttctttaaaagttctgtctttgtatccattagattgtgtattgtctgtttcccatcggcctagacccatatatagggtgcctcgtctttggcttggtcccacactaattagattagagatcacatggtattaaccaaaacaatgaaaattaacatagaaatgaaaacgttgcatatgcacagcgcctccgacttccttgcctctgtacgtcacctctatgctgccaacttgatcatgtgatcttccatccagcatcacagcatattaattttgttctcaagctttatcttccatagaaaatgtactgctgctacgccaggagccaggaggcaaagtaaaactggaattaaaccatacatgcatgcatcacattcaggagaagcacttgcccatatattctctgataataacctgattaaccattgaacaaccgaattcaattaagtagaagaataaaaacattcggcaagacctcgtccaaataaaataaccgaataaaaatcatcggctgtcaatttttgatatcaacacacacacatatgtacgacgttgaagagaagaaaagaaatgcccatgaaaattatggtgagttctggactgacttggttatatggtaggtcttacatcacattattatttagttttggagtggttggacgaaatagtcgtggctgggatgttgggcttggcttgtttgggtcgatagacggatgtagaatggaaacacccggacgaacaattggaccttccctaaggtaattgcccaagcatatagcatttaataaatatgagaatgcatgaatctaaattagcattactaagcatttgtcataagtgactagggactcataggtaattatgggtacaaaggaataaggtaaaccatagtcaaatgcatgtcacaatagcaagtaggatattcatcattgcatacatttttatttgtaaacaaagtaagttcgcaattgggatcaacatgcttaagggaggggtgatgacttatctgctcaggatagtccttattcttgataatacttgatccaccttcacctcctggaagttgcatgagttgcctcacgactaaccgatacacattctatgataggcgataaaaaccaatattcaaacaacaatcaaatatgctcaaacaaaatataaatgttggagtcatacctagggctgctcatactactctcgtttgcttatggattgtatggtgctaagagatctcaaaatggcggtagcggcttatataggcaagggggaaaattgaggtagcttaggctctaaattactcaacatgcaagcaccttatgggcaagagagcttaggggctaagacttcttaatccttctattgtcatgatggcttatttaggagctaaccaacacacatgatacatacattttgttaacatgccgcttagtctacttactgggctatggatggactatcactacagtggctccactctacataaaatgattggcactagagacgtgaaatggctcatagagtaatctaaatgtaatgattcaaatggacaggctggggattggcttatt

SEQ ID NO: 50575 - DNA, 515 bp, Oryza sativa
tttgggacaccggcttcaaagcggagcaaacaaatggtttagatttcgatgcccatgaccattcggctacacacatatccacattctcatcatccgatgacatgagatcatcgtctacaaaattgacagggcgactagatttatcattagacctctaaaaactcttggactctttagcacggctttcttgagccagagcttgttgtaatacctgactaacatctaaaatgattttaccctctaacttttctttaaagtgtggaagtaatccagaatgtgctagttcagcaaggtccttgtcagataatgctaggctaaaacatcggtttcttgtgtctctaaatcttctaatataatcaacaacaggctcattatatttttgcttgaccgatgtcaggtgtgctaacctcaattatacatctccagtataaaagaactcatgaaatttctgctccaactaagaccatgtatgaatagaattgggtgcaataggggtaaaccatgcgaatgcagta

SEQ ID NO: 50576 - DNA, 682 bp, Oryza sativa
aggatcagtcttgttagattagagatatgattaggagagtatcgccatcgtacctcgacatccgcggcgccagaggctttggcctccattgtttcatccgtacaatctacggcaattgccggtgccaggaccgagcctctctctctttcaccgaaatgaagaatagaaccccgaatcgggaaatttctcaagtggtcgctgcaagactaatttaaggttctatgctatgctactcctaaaacaagataaatatgaggtttctcttataatttccaggctaactagctcgattaagaagcgattacaattgaaacaaaagtgagacaggaccacatcataggatgcactactgccagctcaaaagcagagtaaaatgacaactagaattcaacagtggtcccccgacaagaacggactctcagatcttcattccgattcgcgattaatcctgaccgttcttttctcataatcatccttccaatgcattttcttcagaatcttcagacttcagatattcagttaactcagagaccattcatccatttcaattcccagctcctgacagccgggccgtgacaacttggtatcagagcatcttcctgcgcctgtgaacatgtcgggaacacaaggaacaatgggcagagcaacgctgcgctggcagccatcctcgaccagactgaaa

SEQ ID NO: 50577 - DNA, 904 bp, Oryza sativa
agaaaaatcgaggtagttccaactatgaaataaccgagatagcagtcatgtctttctatttattaataaatttcctgtgatggctttcagattttattgtaccttacataaagttcattgttagcaacctagcatcaaagcttaccgctgtctcagaaaagcatttggtgggaaatcctttttgcacccactagaaattagaaaatacaccattttagtgcttatgttcgtttgttaatgacttgtttcaagtgtatctaatggtttagtgtggatttttttctccttctttatggctcttgttgatatttgttcattgttttggggaaccaggtttttaacatggacgctagaaggtttatcagttcaatatactcaagccaacatgtgcatccagtcacacaagtagtaatgaatttgcccaatgatgctgcagaatttttaggtgggttttcattatttgtgttacttaattgaactgttatcttgagttcttatgattatattagagaacaaatttcattctagtatggtattggcttaattcactcattcgcccgttgtgaaacatccactaaaattctgttgaattttggggatgtatattacaaaggatatgcacggtttcatgtcgggttctctcctctcacttttttactatagaagagtaagaacacacaatgccttttggattgtgatcagctgaaatgtagtaatttgtaacctgcatcttataacattgattatatggcattacacattgcagatttacagaatacacatcaaatgtgaatacgcatcgaatgtttgggagaaaaattgtttgggagaaaatctttcttctacaaaatggcattaccaatatagaaactaaataggggaagaaagtctatgagtggtaggg

SEQ ID NO: 50578 - DNA, 3423 bp, Oryza sativa
ggaaaagtagattagcatcacttatggaggtccccttggcctttgccatgttgtcatttggataattgcatctccgaacttcgatattcagtgttataagtgcttaattgacatgtctgataattaataatcctaggtcagtgatgccagcattcagtcttcggtacatgtttagactcttttactttttaaggtaaatgaatgacatccatgttcaatcgtacaaacattgtagtaatatggccagttctaagtgaatctttctagcattgatagtagttatttggtgcagtttgtatgtgaatacaggactacaaatattaagtaccacacatattttgtgtgcgcacggttttgtttcagttgcaagatgcattttgaatttgtaaaaaattggctcaaacaatctcacttgaaaagtttggagatgtaatgagatgttctgggtacacaaaaagaaaagttaaatttagtgttaagagtgtgattacttgtgttgtacaatagacatgtcaatcatcctatgctcttaaatcttaatccatgcttttttagtccatacacctttatattatttaaatattttgacgatcatgttatcttttgtaggttttagaaatatagctccctcaaggaacaataattcttatagactttgacacagtagggcatatttcggtcttcagcttcacatatgaacattaggttacaagaaactcaattgtcaggtaatatctcattatataatgcatttgttatccaatcttgtatatgctttcttttattctaatacaaagttttgaacttgctgctggtgctactcaaaagcaaataaaatatccaaactattgtcaacaagacagagatgatattttcaattattatggaattttttgcaatttgaaatcttggccggtaagtgttcccttacaacagtcactgtgtaacctttattgtcaaattgatattgcaactgtatatgttcttatcctctccttgttcatatttgtcggacatcgtttaaaatgtttgtcatggtataataacaaaaaataaaagtgattcagtcataaatattatgactgaaagcaatgcacttatttgcagcctagtaaaagagtggagctataacaagtaaggggaaatagaaaaatggaagttcatatgggacacgtgatagagatgattggaatccagaataaacagaatttagaggatgctatattttggatgtaatcttaatattatcatatattaacatggattcactctggaggagaaattaagacatctcattggcacattcatgtgtataggcacgaaattgaactaaaatcatgcccatacatgtggataggcacggtttttgcccatccaaatcctggccttatggaactgacaagtcctgtaaaatgtcatatgcgaatcttgaccttgtggaactggatgtcctgtaaatttttagatgttacatttccaagaagaatatgttctgtagacaaaaattgtttttctaataactagcattatgcctgtgtgttgcaacaggaggaccattatgaaattttctgagatatttagaaattattttgatgtatttcttatagacatttaatgtgtatggatttttagaaacaaaaactattttgaatgaaagtctataagatcttttaggctgaatctggatgttcccatccatccctcaaacccacctgacgccctcttccccagggacctagcccaccttattttccaccagaataagttcactcaggtccctcaatttgtcattgagtctgaaattcatccctgaaccgaaatacagatactatgtgtccctcaactcccaaaaccatttcaaatagggttaaaatgaggggctctggtgtgtgtgcggccagcaggggtgaggggccggttgggaattgagcagcaaaaagtagctgccccaatgttaatgctgcagtgcaaggtgtaccttccccacctcttttctctgtagcaaccttcatttgctgagagccaggcacattaagcagcacacatcctgaagcgcatccaacggtgcagattatgggtgcagatgctccagagttccaaacggcattttcatatattctggtcatccccttgcaaacaattgtgatatgtaatagtcaatttttttcaagaattcctttccgatctgaaataataaaatcataaacatggctcacgcgcagaggatctacccaaccagcagggcgccatcaaaacctggtcttccactactatggaaaggaatcaaccgagaccgagcaaggtgccgagcttatcctccacgccatcatggtaatccctagctcttgtagcctcttcctagggccatagaagctggcgcctccaacaattttggcgaatagcgcccatagccatgcagacccgaggggacattggtcggtcgtggagctcacagtggacatgccatcccaaagctcctctcacccaccttattagcaaaatcgaaccccaagacgctctgtacactcctccattcaataaattggccggagtccccgactatcgccaaagccccgaacctccttgagctcggccatggcgttgccatgccgcaacgctcgcccctgctccgccttgcgccgccaccacaggtggagggccgtcggaacccgttcgcacctcccttggtggtagccgagccatccccggccgagtccgcctcgcaccagccaacgctcatgcgtctacttcccagtccagaggttgaagacgacctcaggccgattttgactagagtcaagcacctgtcatttggtctacaaaattattcttaagagaaataatttggtaaatcagataaataaaccttagaccccacatgtcagccatggtaggttgtggataatgtttcggaataaaaataaatcaattaggaacagtactgtttcacaattattggaattacttcaaatttgaatattgttttgactatatctcactcattttagctctgatttgagtgaaacttgaacctgaattcatctaaatttaggagctttccaatggtatataattaattatttaataaaatttattttataattataaaataactaatgtcaaatggttagataatggcaaacctaaaaatgtgctaataaatgaaaattgtcattgtacagtaaactaggtaggagaataattgtctttaacatgttgtgccactgtagaaaccatgtaaatcaattagaagtattgtttcgaattaattgaagcttaggaaatactagtgccatttattaatatatgtccatatataattatacacatgacttccaaattatataaatgaattttagccttatatttttgtcactaaaaatatgaatacatatagatcagtccttagattgtttgtgagga

SEQ ID NO: 50579 - DNA, 653 bp, Oryza sativa
atttaaaattaagagtacttgcgttgaaagtaagtgccacatccaatgataaaagcttattataaatcgtaacgactaaatcattttttatctcttaaaaagttaataatgaaaaaaatcacattaaaaacatcaaaattgctaaatgttagcttttacttatttttatttctttatatggcaatcactagccctaattctacggggctgttcaacgatatatttaaccatattattttttttgacaaaattattaaaaaattcttacatttagtttgttgttaaatctttttaaacacataataaattatgttaaaattttaatgatattgtcaacttataaaaatttaataagatttattttgacaataatatgaacaaccttctccaactttctcaggagtcaaccacaaacaagcaacaggttaataatctagtattctagtaataggtaaaatgggacacgtggcacgccgctatagctctctagactagagttggagacgttgcccagttcccctggaccaccggcgccaccttctgcttgaattttttcctcgccatcgcagtgcgccatctatccatctatcgctagacattgcttttttttctttccaaaataatagacttgaataaacctaccgcctattatt

SEQ ID NO: 50580 - DNA, 1350 bp, Oryza sativa
ttgggttaaatttatggacgtgacagtgaggatgccacaccctcacaaattaagcccttgacgtttctcatgatgagactgtctggtgatccaagaacccagtacactcaccccattaccttcacaatagccagtttgctctgggtatgaacaaagatctttttagtaatcaaggtgagctagatgcttagcatgaacaattacataaaactagttatactcagccgcgttgctgtggaacattacatgccaaatagctaccattcttttaaagatgcacacactaagaactgggcatgaaaaacataaaagaaagcaaaggcaatgcagatgattgctttatgtaaaactcgatgcatgtttacaaaagaaaaaccgctcagtattagtatgctgcaatggaagattaatcatttaattttttttttgggatcaacttactcaatgtatcgtgagaacagtgaagctacaggagaagcaggcaggttctgctgttctgcgtcgaagatatatacttagggatctcggatcagccatgatccattgttaaattaagggcaagataaaaatatactccatctgtcggcaagataaaaatatactccatccgtcccattttaagttccatccgtcccattttaagtgcaatcataagtttccgtgcttaattttaaccgtttatcttatttaattaatatttttattgttataagatgataaaatatgaatagtaaaatttaaataagacggacagtcaaagttgtgcataaaaaatcatggttacacttaaaggagggagtaagatatatataaagggaaagatttaattgctaaacttattagccaacttgaaaaaagaaaagaatattaacattagctaccaaaaccaagctgacagcagaaggaaaaaatagtgaatctttttttagatgaaagatcattattactccacagattaggggaagcgatgatgactgtggaaaaatcaaactctgatagcaataagaatgagaatgtatcacatagaaaatgttgtgcgacaaaagaaaatccaaggaatgatctgaccttcatgaacactggatgcaaattgactgggacgacggtgtgaactgtgaagtgtctgcggcagcagaggaagtccaaaagccaagctaagaaattgtctgcgagaaggatggaaacctaggcactctatcaagtatattatgtgcgtacgattttagagttacctcacccaccggcaggcaatccaattcgaatgtgcataactcagaccagaagtccagaaccaaaacttgattatagcaaaataatagacatgaatttctccgagcgcccacatacgta

SEQ ID NO: 50581 - DNA, 778 bp, Oryza sativa
gcagatggcttcgccatagcaagttcaacttcaaggagacccaagacgccatcttagccgatcaagcccaggggccactgggccagcgttccccagtcggcccactagaagcccatgtacctcaattacactatatacccatgtaaatgtccctttcataagggcaatcatataaattcccctgtaaaacctaaccctaataggggaacctgtaatgggattataaatagacccctagggtcatgtaaaaggggggatcctaagaaaaattctcaatttaatacactttaagcggttgtcatttcgacaatagctggcgccaaccgtggggacctccgagcgaaaccactgagagcgaatgccaccgaagaaggtcgcaaaggagaatgttgcaaggcgtaaggagagtgaagcaggagtggagatggcagccgaggagggagcagaagccttcggcacttggtgccgaagccgatgtggtaccatcgactttggcccctgcgccgcaaccaccaccttcggctcctactgcttcgacggggcaggcaccgaacacagtcgatgcggcgaaggcggtagcagcggcaagggcgctctagaccagggcggagatcctttcgacaagtcaactggtggtgccccaggctgcttcgccgcagcaggctatagcttcgaccgcgcacagcacaccggaccaacctcaaagcgcaagccgaagccaacatgggggccatgcgttagaatatggtgcgactcccggacatgcttcgtcaaatgc

SEQ ID NO: 50582 - DNA, 1122 bp, Oryza sativa
ccaggattggttcgccgaaccaacctggggctggcccaatccagcccagtttcggctggtggcctcctctattgctccatccgcagacttgtgaatttttggcccaattcatcgtgtcaattctgagttcttggcctattcacacacaagtctggttctcgacatcgtccgattgatttattgtctgagttgatgtcggttctcctctactttatgatcattctctgcaaaaggttagtaaacctaatactagtggaatattattattctgattaacatatgcattgcaagcatcactagttctctcccattttagtaatattgactgtcgaaactgatcgataacgaccgtcaacagccaacaagggtagggctattacctgattccgatgaatacggggcccgaacctatataaaaatcagtctctatctcttttacctcaaccccgcatattctgtagtaccaacaatccccataccatgcaaatatcgtagtcgtgagaaaaaacgtcgacagattccaatccagaagtggtatgtttttgttagcaattaactaaccgattcaccttggagggatatattttaattgtgtgatttggtttggcactaacaagggaagactaggggcacatgagctgcatgctcaaagctttgtaaaaaataactttgtcttacattctcatcactggctcccaatgtggcatgatctaatcgtcatgtgtcacaactggagataactcaatatgcattgcatacgtgcgtgcattattccatgttccaggaggcgaggtacataaaagttgatacaaatcaaagtttaacaagtagaagcataaatagtacttattacacgggcaacccaaaggccagctcatagagaaatatgaagaaacacggaagactagggcgaacacgacaggtgtttgacggcagacacgagctagacaccgaacccatcctcttccaagagctcctcttctggggtggaagaaaaatgagcgagactgagtacaaccaccatactcaacaagtcataccggcaaacgcacagtaaatgcaaggaagtacaagggaataataatagggcgttaggttttgcattaaagtagcattttaaac

SEQ ID NO: 50583 - DNA, 729 bp, Oryza sativa
ctgtcggggtctcccttgcaattaattaagatagtctgcacgcgcgcacgcactgcacgcacatggttactgcattcaggggaagctcgcacgtgataataacttgttttcatgggtcgcaaatgctctctaaaacttgcagtgcatcataatttaaaattacaaattaattccatctgctatgtataaattaaacccgataaaaattttaaatacataaacatttagggcgcccttcatattgtactgccagtacataaacatttagagcccctttaatttgtagaaaaaatataagaattttagaggatgttaatcctattgaaaaaaaaaaatctatgaagtcctttgaaacaaaggattgaatcctctcgaatcctttaaaattcctatgaaatgggtaattctatatacattttggaggaaagttagcaaaaggtttaacctgttgaaaaattttctccgagtctatctttctaatctgattcctgcgtttttcctatggtccaatcaaacggtcattcctgtgttttgtaattctctgttttacaattgtatttctgtcagaatcctgcgtttttcttattactctgttttttcatttctacgattcaaagaggcccttaagataggtgatttttcatatcactataagaatccagaatttttatgggactacctatccgacatgcaacataaatctaggtaagaaaacagtcaccttccaca

SEQ ID NO: 50584 - DNA, 904 bp, Oryza sativa
ttgacatcgtccgattgatttatcgtctgattcgatgtcgattctcctccactttatggttattctctgtaaaaggttagtaaacctaatactagtggaatattattattctaacatgaatatgcattgcaagcataactagttctcctctattttggtaatattgacggttgaaactaatcgcttacgaccgtcaacaatgagtcagctacggtcttcaacataggtaaatttgggatgcaagttacggggttcaagtttcgtgacttaaaatatgcatgcaactcaatttcacgaaggctagcagcaaccttatcacattctacaaggagctccgaaagaccaagtttcctatgaaatcttttcttgaagacgttattcatactttcgcaactttgagtcgaggtcatatcagttgtaaaagagtcacggaacacaatagcccacttcttcctcaaagcatacagatttgacatccatacgttatcctcaaacttgtattcactcaacaattcatgctacatcttgttgaaatgatactctgatctgtcctgatagacacatctcttaaaatcagttagaaacttgttaggatgcttatgaattacatgaccaagatttttacaaccatttagataaatgtgccacaaacaaagacaatgacttatatccgggagtacaaaagcaattgctgctgcaatggctgcgtcttgatcagtgaaaattgtgctcggatgcttgcctgacattgctattagaaaggtttcaaagagccaaacaaatgattcaatagttagtgtggataatataaggtaaaggaagtttataacaaagggaaatttcagtctatattgtagcttaccttgcatcccaaatctgcattgtttttttcaaagtttctgtg

SEQ ID NO: 50585 - DNA, 717 bp, Oryza sativa
gaagattgaaggtaaccacatgccagcttggtttatcagattaagttgcttgcaccatataaatttagaatgtgttgcttgcaccataaccacattacagtttctcttcataatgaaatgaagtgcagtcctgcgttttcaagaaaaaaaaaagtatgtttggttcaaacaggtctatgtacttgagagatgcatatttatattcctacagctgcatatgtgggtcagcttaaattcaattgatcatggaatggcagcctagcaggcgctcatgtggctttgatgtgccatttttctccagtctcacccgcagcaaagctcatctgtgagaaagccctcccatgctagtttctatccccacacttcccttttctcctcctccagctacaccagcagcaaagctcacctgtgagaaagccctcccatatgcttttttctgtccccacacttttgaagcactatttactccttgttttccatctcttctgccacactcattttacttcctttttctcctacaatataaagccatgattgttttctctctggcgaaccacagtgactgataagtgtgtttctggattaatttttcttcttcacacgtatcctctactttgcctgttgagtgttgagggccccaattctaacgtatcccagtgcctgaggtcactttgtcatggtggttcaatcttaccagctagccagctatgttttgag

SEQ ID NO: 50586 - DNA, 796 bp, Oryza sativa
ttgaatcgccctttgcctagcacgtcgtctatttcagccctggtgacctttgatcactgacgatcgtccccaccctaatcgtcgtctctttgcctcttctcccacggctgcagtgggagtctatttgggggcatactattgcagagggacataaatacataactcttgactccgtggatgactacattagtgcccgagctgtgtcatttgcactctagacctttagttatacattaaaccaagattagggatctagatttgcatttttgaggttcatggaactacatgacacctcactccatgtttaaggaccaatagtgtattttatactttgagcaatgaagttttatgcaaaatcctttacaattagtatattgcatgaaattaactgccattggctgctcattaattgtcaagccacagccagaatttgaattttagaacttaattgtagattgattttcaatttttttttattttcaaccttggcttctgaacagctagattgaagtataaaagtctagccctaaaataacttttacttggttcatttgtcttggatgcatcttaacctttaccgtgaaaatctaatgtactaatttatttataattaaccagcaagatttttttttaccaaaatcaacaagcttttttggtacatagaaaatgatacacaaggtcaaaatcatgtttttcactcatctactaatggtatgttgacggaggaagggaaaataaaagataaaatttgagaatgaaggacagggagcagatttcatgagggcaaatgagagaa

SEQ ID NO: 50587 - DNA, 1864 bp, Oryza sativa
atgaccaattcaccctcactgttcctttagaagggagcaaactatggatcaattatatatccgcactaaagcataaaggtggagcatggctgcatccacaattcattgttgatctcattgcgacaagatagaaaattgcaagaacaggagaaggttgaactggatgttaacagtggtcatccatggaaaagctaagccatagtccaattttttttttggacttcatgatggtattgtgcaaatcttcacatttgtgatgataacttgcaacctgctactattattatgataccaaccaaatttactctttctgaaatgtcttgcggaagaagtaatgaattattgtcgtgatgccattaatttttgaaaaatagttgcagttctatgaaatttaatcaatataatattgttattaaatagaagcaaacactttaaatggttgaaaccaaacgactgttgggaaaaagaatgattaccttcttgaccgtccagcaaagcaatgaaccagaacattgccaccagagctgatagattcatcaatgaaactaaagcattcatcaaaatgctttgccaaatcaatgtctgggctgtcaagtactgtatattggtaaacaaataatgatttaggagtgctggggaatttggacaagggcaacacaaaaaagagggtataatcacatcaataggtatttgaaacaccatgacacagtcaagaagtttaagtgctccatgcttatttcatttctcttgacattacagttttccagattgagtgataatctaacatgtctggtaaacttacaacacaacagatgaaaagtacataatttagaagtaaatgcagcacatttcttaaacttgcacacagagttcaaataggtatgtgaacttaagcgatgcgcattattactcctaaatatgcatacttcggttctaacttagttcttactggcaatagatgattgaatggctcattgcttcacttacatgacttcctccctccatccctcctcaccctctctactctctctgcatcctgccacaaccctaatttagttgttgcatccccaaacaacttcctcaaaacatagctggctagctggtaagattgaaccaccatgacaaagtgacctcaggcactgggatacgtgctgtacactacaggcagggagggagggaggtttggaatgttttttctaaatgattaatataacaacctaaaataatgtgtcagatgttcatgtcgaaaccgatggttggatgctttgttttcttatcagaatttttaggattttcattgatttaagataacgacgtaacatcttaagagcgtttataagatgttttttttaaaaaaaaatagatctagtgacctaaaataatgttttatttgattgaaaataatgtgtccatcgatttatgtctaatcctatggttggatgttgtttcccaaaatttctaagaattttctataatttaagaatttcatataccaacttagagttttttcttattagaaaaactaacaaatcgatagtctaatgctttgttcatttttaatatttgctagtattttatttaatttaatagcatcgtatagcatcttaaaagtgtttgtagcatgtttagaatgacagatcaggacctgctagacctagcgggtggagatatgtggtattttaatgtaaaaataatattgattttaatttctcatgaagaaggcttgttggtatgtacttgagagggaggttgtggatatgtgtgttttaaaagaaaaaacgatctaaccttcgaaaatgaaataatagatccaccaatttaattaaaaatcaatgggcaaattatagtatcacttgacgattta

SEQ ID NO: 50588 - DNA, 3928 bp, Oryza sativa
aaagatgttatatatatagatataatctattagtaccaaataatgggtatgtatagatctaatctaacggtataaaataacggtccatcaatttaaatgaaaattaacggtgagattagactatgccacatggtgacttaggagcgtttgtaggattgccacgtggccgtttgggagcgtttgtaggaagtttaatgtacttttagtatataatagatagatagatagatatgtaataaatgattaagttttttttggttaatagtaataacgcagctcatattgtaaaatttataactaaataacctaagttccgttttaatccattcaagttgcagtgaatctgttaaaattggtttcttttgctgtttcagtagccttattgcttgtattttttgtatgctttgtttatcatttagattctgacagtttcggtgatccagtttattttgaagtggttgccgagattccgtcagctcaagagtaaggcaagtcatacacatgttaaacctatttttataaaatcccctgctttctattaaattgtattgtttcagaatgtcatgtgggatggatgcctatcgtgctcagccaattgaatatcttatgccattgaaaacttgggttataattgactagatgattggtttaggaatacttagccatgcttagatcaattagttcataatggaattcattataatttagtccttaattatattatgacgtaccaccatggttatggtttaattaactaaaatatgcttaaatggtgggttgggggtgcatgattttggaagtcatgcccatggcaattaagaaccagttctcaggaatccctggaagatataatcgtacttaccagctggtaaaataacttgaactagctgacatactatggcaagggaaaaggcgatggtgcagttcggacctggatattagtctctgcagtttccagatttatctagacacgagaggagattgcctgacttggaacaaggaaggggtggaacctgaggtgggtatgttcggttagggagggttatatgaagggtttcgtcataatttccccctttgtagtatcgcggtgatactttggagcatggtaacatgtgtggaatcgtatcttgtgggtaaagttgtacacctttgatcagagttaaaactattcgaatagccatgtccgcggttattgggtggtcaatcagctcaccgtgattagtctcagtataataatatgactcattaaactagtgtagttcagatggtttggttgggcctgttgcaacatggttttagcgttgaacagtgatgatttaatattgcttaattacatatattgttttacttattcaaaatatgatttataaatgctgcttttattggaaatatccaatgagccattcctttgtgaatatcttacatcatgcatttccgttggtatgacttgttgagtatggtggttggtgctcagtcttgctttatttttctccaccccagagagagacagagattggttcagatggtgagttctatgagaattgagcttgttccggactatgagaattgagcttgttccggacgttgaggatgcctgtggtttatggagaaagctatgcttttggtcatgaagattaagtctagcttatttgtttttccgctgcgtttgtaagaattatttattatttttgtaaggcgtggatctgtttatcaaattgtcgtttgtctactctggctgatcctagatagagattttaatacacattctgcttgaaattcgggttagcaaatttctgggcgtgacaagaagaaaggatcagcaagcttcttccacggtttttcacggttgatgagcaaatagaaagaacaggggagaatggtgcacaaggctaactagagctatttatgcactccaaagctaacggctagatgaggcccgatgtcagttgatgcaaacttaaaaaaatatatttcaaatggcagatttcctacatttttcctatggtatatcggaatgcacattttttttacaattccttaggtttagcttcccataggattggacttcacagctatccttattccttcatttttttagggcaacagcaatgtataatgctcaagtgggtattatggtgggtcctaggtgggacccactactacatattgtcaccttatcaggtcctgtttgtcgtgtcttctaatttacttaattttgaaaattagcattcgtgtttatttgcctaaaatagcttaatggaaatttcataaatgaaaaaggtttaatttgactaaataaattaatcacaccgccatttattttatcgtttgttaattagagttatttggtttctatttgagttttgggagtggagctcaattttggaagtatttattctcaatccagagaaattcctcaacagtccaaaatctctaaatttctatttttccagaaaatcctattatccttcttgttcctcctttccttccttttcctctctttttattctttttcttttcttttttcctttcttactagttaggtgtccgtgcattgcaacgggtttaataaagtatatcgtttatatattgcataaaaaggtgaaatgatattctttatatatattgaacaatgtaacaatgtaggtgttggaacaaaatccaacatgcatggctagagcatccctccaatgggagggagcccaagcttagccctatgaggaccacaagagtgaatgagagagaaagagaatcaatggaatgggggagagatccctctcacttgcccttggaggactccttttattcatatgtaaaagaaaattacatctttgctcttgattggctacatatatacaacatcctcttagatgtattttagtccttttatacattagtttatacaacaccctaagtatggggttattcctcaacaataccccctcatctgctggctccgaggttcggggggagcagatgatttccagcccctgcttcttagggtgttgatctatgcctgcattttgcatcggataccctcatgctcagcaaagaccacactgaaaaggcgacaccgtcttgagctcttgagatgtggagtccggtccaccccctctagcggtgaaagccgcggtgctcgacggaggtaccaccgtccagagcccgcgagaaatggaggtcagtccatcccctctagcggtgaaagccgcggtgcttgatggaggcagcgccgtccgtagtgcgcgaaggcgagtgccgggggtgccgcgcgaagccacgcgtggctggtggagcttggctttaaggcaggcgtggccggcggagctgtgcggggccagcggaaggactgtagagtccgccggcgcgagcctctgcgccgtggcgtggtccagcggaaggggccgagccagaggcaaaatgcgccccacggggctggcgccgggcgcgagtcggcggagggtgtggcccgcggagtcttggccgtaggcgcgggggcggcctcacgcagcgaggccggcgtaggccgcttagcgattacgcacgatgcggaaccgcttccgcagcgcagagtcgtgctgtctttcttgcctccttttctccttcttcttcttcttccttttttttcgtcatgaacagtgccatgcgcatgcatgcagcttgcgcccgtgcatggcacttacactcgcaggatgggaatcaaatgcatgtgcatgcaaccgaaccacacggggctggaaaccgcttcggccgttgtcgacgcggagatggcgactcgcgacaaaggcgaccgcggggcttgcccacgcggaggcggcggagcgggggagccgcgaccgagtcggcggaggcgcgagggatcacgtggaggccacggagcctcgcgggtccacggtgttgaaattatgagcacataatgatttaatttatt

SEQ ID NO: 50589 - DNA, 1140 bp, Oryza sativa
ggcacgtctggtcgaagggtctcataacataccgccaacagttcccatcatgaacttcagccccagtgggctttgggatcttggtttgaggttctgacgacgtgtccgtcaatggtggaggtggccttcctgacatgtttaccgtcttccaccgggcgtgccaaaagcgtgttgatgcgtaaaacaggaggcctgggagatctgcttaactccagtgcaggtccaaaatcttgcctttaggttcgtgagcgtgccaagttcatttgatcctgcaatcaacaagaaataaagacaaagaaaccgcggttaaatttataaatgatagccgatcggctagttgccgatgacatcatttatctctgagccgatgtcatgtttgaatcgatcggcagatataaataagtaacaaaagactaaatctacttgatcggctgtagatattaacaactaataatccttatatcgatatatacttaaatcaagtggttgggatagatcagtcgccataccgagacagtataaatcacttagattgaaatatatattaacaacgagattatagatgctcatagcatagcagatcagatagatctagcatgtatcggctaatactccgataccactctatattaagatattaaagcaagcaaaatatatcaaaacggaagcctaacatactttgttgtactaagatcataatataaaaggcagatctagcatgtcaattaagcatatgaaatataaggctaaatcaggtaagatcgggtgaaaccccgatactaccctaatcggcaaccaaaagcaggctagaggttgagattctaatcacgacttataacgtcaaactcaactgatgcagctataagtatgaaaagaaggacaatatctagacaatcaagcagttggatgtttcatagagtggtgaatatcctgtacgatctaagccaacatagatatttaacctaatcggctgccttccaatgatagatgttagccgattgaaggttagataacgatattatcaaagattatatagaatatatgataacccgacgaattacataaacaagattagagtatcataaagatggaagcactaatcccgagaacacaagccgccacagcaagttttacctctag

SEQ ID NO: 50590 - DNA, 912 bp, Oryza sativa
gagccacgggtttgacctgtagcactggcggtggttggtgaaggacgtggacagcgcctggtaggccaacgccgtgcccgtaggcagcagctgcgccaggttcgccgtgctggccataaccttgtcagtcatctccggtgtcggcctagccgccggcagcgcaggcgcagctgtcgccttacgctcgccgacaccgttgggcatcagcgtcgtggccatgcttatatctgcctcaggagctgcctcgccgtcaccattggtttcttgtggttgtggcatatcaatcagcttggtctcaagtgaggattccattacttggttttccttgtgcattaacgaaatccggttgataattatgtataatacgttacgttcttgaggatttatataggtgaatcgtttgcagttttttccacgcgtggttggtacgcgtgcattggattaagaggaaatggtcaaccagagactaagctgagctaggtagttggaaagttggaatcattcttagctttggaattggtatactagttgatcctcctcccatcctaaattattgggcgccccatttttttttaaaatcaaagtcggtaatttttaactaatgatcatactaaccacatctataataagtattatatatgttatatcactagatttatattttgaagcacttacatatgatgttaatttcatattcatcggaaactttacatagaataaattaaaagtcaaagtatgctgctcatctctacaaatggattcatgcaatccatactgaaaccaaaccttatgtttcatacagacttttcgaagtcttgaaatgtgatgtccatgcttcgccgatgcatccatgggcagagttttttcccatatgttcttttaccgtgccaacgcatcattttaacttgagct

SEQ ID NO: 50591 - DNA, 1062 bp, Oryza sativa
ttgtgattcactgatatgtataatatgtgatgtatttggtttgtgtgtaatttttttaagatttgtgatgtatttgatttgtgtatacaagtaacttaagatttgtgatgtgaatgttttgggatgttagtttgatttgggaatatgcatctcactcgatttgggagaaaatacagggaataaactcgggctaaaaaacaatggaaaaaaaagaaaatgagacctattgggactgccgctaccctctaaagataccgacaccaaccaggactaaagattgacatctttagtcccggattgctagtcccgtttgaaaaaacgggactaaagaaagttaccaatcggagtataaacggtttctccagcagtggtagttttgtgataactctagtattaaatctataactttgtgatagttggcttaaatatgtaattttatgataagtcatgtattaaatttgtagttttgtgatgcaacatcttaaatcaatagttttattatgatctgatcaaagtaactgtagttttgtaaaatttactcaaaaagtattcagattcgttgtattagttatgtcacatctaattcaaagtttattttatgtgatgaagggagttggtggttaactagcaaaacccacttatataccaaaataagccataaacccgcttattttgatgtatcaggacatcctcaatgtagtgcaaaaatatttcataggtaaaaaatattacattcagccatatatataaagaaaaaataataaaagatatccatatatatatatatatatatatatatatatatatatatatatatatatcatttgacagaaaaccccctcacaaatcttgcaaattttggaccatccgattgctttaagattcgtgcaggcaaccaaaccctaaaaatcctctctcctctctctcccgattcctctcctctcccgattcctcacgcgccgccgctcctcagcgtctccgccaccgccgccgccaccccagcgcgccaccgcctggccttgccggctggccgaatggtgtcaacggcgccggcgaggcccg

SEQ ID NO: 50592 - DNA, 2927 bp, Oryza sativa
agcaagatttagaagggctatttaatagcttggaggatccaaacaaggccatcggtacgatgctcgatgagcattgtgatcagggatggagctagaattttgagtcattggggtcagacctgtacaatatacaaacgttgtgtttggaaggtatttagtttgggagcattgtagtataaagtcacgtacactagattcaaaaaaattagcttagaactatgagtggtttaagattatttcagtgaggtttagtttaagattatttcagtgaggtttaaattactttatttaaaactatctaagaatttgtgagtgggagccattgaaaagttggggctaacaaacgcttaggctgtgttcgggaggtatgtttctcacctcctatgcatgcaaaagggagcaacgcattttcttataattaattaagtatttactaatttttctaaaaaatgaattaatatgattttctaaagcaacttttgtattttttatttggcaaaatatacaccgtttagtagtttgaaaagcgtacgcacggaaaacgagtgagatgagtagggaaagttaggcaaagaactcagccttaattccttcggcaattttttgtttgctaatttaaaggcctaatgtgtagtagttgattactagcaaattaaactactaatctaattgcatggatcgatcggatagacacagtacatagctaaaattgctaacttgttaacagatcaaatatggtaaagctggctgggcaacgatccataacctacatgttagatattaattaatatgcgctgatacaccaatttaattgggactcgggagtagtgagtgcataaattttcaaagaactgagcaaactgttttaacgttttcctctgtgactgagatttctgttcggcaggcttcagcttctggggtcaccgcctacaaaatgctgacgaatacacagggttggctaagtccatcagggtcatctgacccagagctacgtacaactgtggatccgcccctgattgcgataatgaacgtgcacccgctccaactggctgtccaggaggacacttcaactgtcgccaagtttgtatccaaaacgggtacaagggtgggtattgcctagataattgctagcaagagaaactgcaggtcggccgaagcaaattgctccttgaacatgcatgagaggatggatgtagtagtacgccaccttggaaagagttgaaatttcatagaagattttttttttctttgtatcttggtatttaattgttggtttgtttgtgattgataaatccaatttttgattcttatgttgctagtcgatttctcaaacggccgtgaaactagctaagttttgagaagaattcataaagagcaaagggtcatcgttcttttcttccatgccttcatacttaatgtgctctctatctttacctgaattaaatttgaaaatatactgttaattcaatttgttattagaaatattcgggatgcaaaatctttcgcacaaatataccatcggtctcgcacaaccattgcacgaaaataatgttgaaatgacgtcgtgaccggtatcgcgcagcggtctcgctcaagcaaacagcgataccactcaagcaatcaacgctatcgctcacgcaaagagcgataccgtgccttgccgatttaattagcagttaattatcttgattagcgattaattagttaggataattaaacactaattattattagttaattgttaattatgtacttaatcactaatcaaatagatcccattgaacagtgtcgctgatggcttctgcgagaccattcggtctcgctcttccattccgcgagaccgcacggtctcgcactgctgccgcgcgagatcatgtctcgcgctttcgccgtggatatcgtccacgatgtcatccccacgtcattttcgtgcaacggaattgcgacactgatgatatatttctgcacaagtttttgcatcccgaatattcctaagaaaaaattgaatgaacagtatatttttaaatttaattcatctctacctcactcagtcattgatagtgttggcaaagctagaagatgcagcctgtggaggggttagccataaattcaagaaatccatggataaagtttgtcaaccactgagaaaagcggtttagggaaacctagggctggatatcgagctggctcggctcggctcggctcggctcggtcaggctcggtaagataacgagctggctcggctcggctcgttaaccctaacgagctaaaaagctagctcggctcggctcggcaaaaagctcgagctagctcgtttggctcgtgagccagggacaaaaaaatgtaaaatgtaaactaccatacatttcaatgagtcatataacacatatttatccatcatgcaggctagcagcaagcatcatgcgcatacacgcaatagagtacaaattaggtccatcgtccatgtctccatcacatattcatctatcaactatcatccatgcaaattgcaaagtacgactacatcagctagacaggaagggcgcataaacataactacataagttaacatagcagaatgacacattgtttaagttccatcattctgtatttccatgcaaacacacaaaaggcatggtcagttaacacttctcatccatggtaaaatgtctctccttcagtcctcctccctttcctatagggtcaataatagtacaacaaacagcactgtgttaacaagatgataagcaacaacaacaagccaacaaataacaaaaaaaggacaataagcacatatacccactagacactaattgcttgccaccacgcattttgggaattcaatagactcaacatcatcttcaccatctccaatctaaataaatatagacaaatattagtatgtcacaagacaaataaagtcaaac

SEQ ID NO: 50593 - DNA, 953 bp, Oryza sativa
cctaaatagcaagattccggagggctatttaataaccctccggatccaaacagggcctatgttgaatggacgatggtgtagatgttgaagttaaccatgtttcaaccataattattaggaccggaccggaaaacaaagcggccaagcctcggttcagggattttctggtccaaccggttgaaccgtaggatagctttgtgatgtagttcttttattcaagggaaggtggagggttcgaatccccatcccaacctttttccccccattttctcaactctctctcctctcggttccctcctgccatccttctcatcatccacgtgcggacccaccagtctagaggccctggtttcggttttttttcagccagaccatcgatctggttcaatcctaataattatggtttcaacctagtcaactagagaagcaaaatctataacctttagactagtagtacaaagaggaatacccacataagtgaaggggaagtgcccggtgaatagctaaagtcgtcggctaagttttcagctttatcatggtacaaattaaacggaaacatgcattaaatatgtatcatgataaatataataaaatcaggttacaaacttcatcacaaatatttgtgaaaattcactttcagaccagtagaggcaacataccaacccatgatgatgatttcccaatcattcaatacactggtgacactttgctctttatgaattcttctcagaacgagctagtttcacggcagtttgaaaaatcgactagcaacataataatcaaaatttggatttatcaatcacaaacaaaccaacaattacataccaacatacaaagaaagaatatcatccctgaaatttcaactatttccaaggtggtgtactactacatccatcctctcatgcacgttcaaggagcattttgcttcggcggacctgcagcttctcttgcca

SEQ ID NO: 50594 - DNA, 4441 bp, Oryza sativa
gaggaaggggacggagaggattgcttggaggcaaccacggtggtggagcttcggcaaatctccaccatggcgccagtcggggcagcaatggagtggcatgatctggagggggtgtcgatggcagagtgtagtggagggcacgtgggagtggtcgtcaacggcggagaaaagcgagcgatggccggccggccgtcgccgccgtgagggcaagagagagagcaagaggggaacagcggtcgagtggcggctagggtttgggggaggtggagcctggagggatgttcggtttcgcaaaaagacccctcactttacgcttttcagagcgcactcctgttttccgaattttctcttcttagcataagatatttcatatttcagagggccggggcgtaagaatacatggctgaggaatgtacgtctagggatctataacaaattatcggtaaaatcaagaggttttttgaaaagtgatcagtcccacaacccggcgctcgctcgcgaaatcttgctacctgggcgttcgggggcgacgtggatagcgcggcgatcgaacacacgactccaaatcgctgtgggagcttcagttgggggcaggttttaatttaaccgattcttgtgtcctcctccaacacctttcatctctacgagggttttcactttcgatttcaccgaaaattttgaccttttcgataaaactgatattcccaaaattttgagatcctcggcactttttggacaaaaagtttatgaaattttaacacaatttaattgaattaaactaaaatttgaccaaattcacaaaaaattgagaaaaaccaaaatttttggtcgagatagtggcttgccgaggagagggggtatccaaaattgcaatcactgatccctaccaccatgcctctcccatgcactaccttcgctctagccacactctctcaacaggccttctccgggcgtgtagccacccacacggtggttggtctgggtgtccatggagtttttatttgtcaaggcaataagttatatgcggtacttcatctgtttataaatattttgatacgtaaaacaagatttagtcaaaagttaaaacttagacaatcacttttgtattacagtaagtttataaagaatctagtaattaagtttatgatattacatacaacaatgcttttcaaagcaaatatactcatactattttttttacttttaaagtaagcattatatttgagaaacttttgatagctaaagttttaaaagttcgtcctaacatcaaatatatgaatggagacagtaaataaatactccattagtcattattttttaataaacggtgccattgacttttaggataacgtttaaccattcatctattttttaaaaaaaattatataaatatcatttattttttttggcatgttttatcattaaagaaactttaagtttgtcttatactttagcatatactccctccgtttcgtaatgtaagtcattctagcattacctatattcatatatatgtctagatttattaacatctatatgaatatgtgcaatgctagaatgacttacattatgaaatagaggaagtatatgttaatttttaaaataagacaaaggctgtgttcgctggtgctcgttcccagcaggaacagtatgcacagaaaacgaaacggtctattagcgtgtgattaattaagtattagctaattttttttaaaaaaatggatcaatatgtttttttaagcaactttcgtatagaaattttttttaaaaaaaacacaccgtttagcagtttgaaaagcgtgcatacggaaaatgagggagagggttggtaacctggaggtctgaacacagccaaaggagcaaacgttatttgaacacagcaaaaattaaagatgtttttgccggtacttttggtacgtcatccgtgtatgagtcggtttttaagttcattcacttttagaaatacaaatccgtatttgagtcggtttttaagttacttcatttttgggaatatataaggaatcgtataaataatctcttaaaaaactcgcatgctaacttaagatgatcgggcttctaattgtagcacatgtttttctaacaaaatatatatccaagcgaatttaacacaatgaatttcaccttaactaaacctataataataataagattaaaatagtcttcacctattgcaacgcacatgcatttttctagtctactagcaaatatgcccgtgcgttgcaacgggtgaaaaaacgtaatgataatatacgtttttcatgcttaaccatgtcgataacaattagaaaattagaactacgaaactttattttctagataacaattagaaaattagaactacgaaactttattttctagcgcgttttcttttatgctttattctgacatttttccctcacgtgttttttaaaccgtttttattttctcgcgcatttattccttttttaatatactgtagaaacttctctttttatagttagataagattagattagagataaagaagatatataaatggactaaaaaacgacgaatataaatttgacttttttcctccgcgcttttttccgtccttttaattattttctcgtgcatttcttttacgaagggtttttttcaccactttcacataatgtcaaaccttactagatataataggattccattttttttaccgcatcacgtataattcctttttctttaaaaacagacaattttatggcccttttttatcgcgtcaacggagtcagaattgttttgattttttcccctttttttggatcggacagattttttttttgcccggtttatttcgcccgatcgattttttttaccgcgtcacatataattccttttactttgtatttttttcgccctttttttaccgcgtcgacggagtcggattcgttttgatttttttctccctttactttggaattttttcgccctgttttcaccacgtcgacggagtcggattcgttttgatttttcccctttttggctttttttgataggacagatttgtttttttttcgccccgtttttttatcggacttttatcttttttttcgcctggtttttttattttttttaccgcgtcacatataattcctttttctttatcggaaagttttttttcgcctttttttaccgcgtcgatggagtcagattcttttcagctttttccttttcttttatcggacaaattttttttttcgcccattttttttctcctgtttttttcggatcggactatttttttcttttttcgcccggtcgatttttttaccacgatatatataattcctttttctttggaataggacagttttctttttatttttttaaactctttttaccgcgtcgatgtagtcggattcgtttcgatttttttcctttttttgctttcttttttgtcggacagatttgttttttttccacccggtttttttccgcccaggtttttttatcggacttttctttttttttttgctccacgatacatataattcatttttctttggaataggacagttttcttttcatttttttaaactctttttaccgcgtcaatgtagtcggattcgtttcggtattttttccttttttccctttttttttgtcggacatatttgttttttttccgcccggttttttttcgccaggtttttttatcggacttttctttttttttcgctcggtttttttctcccgttttttgacggacgacagaagcacctagagaagtgttttttttcttttctccaatccaatacagatcggatctcttccagggaaatcagattttttttctccagggaatcggactctttttttcgctttttttattcattaaacggtttgtctctcggacttttttttcctttttaagggatcgggtgtttttttgccagggacgggtgtttttttcgcccggttttttttttcactttttttttggatcagactttttttttcgtccggtttttttgatcagacaaacttggttttttctgcccgttttttttcacccggtttttttgacggacgatggaagcacctcttattttttaagtagatagtagatagatagattaaaaagatgtagtaaaaacacgtacgaaaaaagtggctactttcaaatgctactttaacaactgttgctactttcaactctggctggaaatagttggcatatgtgacgtggtctcatgtctattcgtgtattagtgtattctaattctactaatcggattaggataggccgatcatagagttgatatatagcctcttctccaacggtaatctccctccgacgatgcactggtagagaaaccatctttggtcggtcgacccattatccataatagtcccggttccattaaaaaccgggactaaaaatgatttttagtcccggtta

SEQ ID NO: 50595 - DNA, 585 bp, Oryza sativa
ttctttccgaactatgttacacccaatcctataccatgccagattaagaaagccactagtagccaattctttccaagacatgatctcttaatgatttttactactaattgaagggaccgtctgttggtcgccagaaaaaaattgaatccgtcagtcaatttgtgtgagcattcgatctgcatccaacgggcgtgtgacaaagaaacaaagggagttagtgggcccgtagcactccttttgcggtcccattttggggtctgattttttattctccgtattgggcttttgtctttttctaggcaatgtgcaatgggcctgtatgatgttttattagtggaaaaaaaaatcaactttaactcccttaaagtaggctgaatctaactcgtatcccttaaccagaaaaccgggtagaacgaccctgagaaactggtataatttgactccttcgatggttttggagggcggtttcgctgacgtggcgctttaacccgatcaactggttgactctgtatgtgggacccacatgtcagtgtcacattttcttctcccttttttttttctctttttctcctctttctagcccgg

SEQ ID NO: 50596 - DNA, 538 bp, Oryza sativa
gtcaggaagccgctcaaccccaccgtgatggcccggctgtggagggtggtggcatggcccatgtactgcctggaagaaaggattcaggccaatgtcgttgccaatgctggcgctggtggcgaaaacaacgactacgacgacgacgtagttatcgtcgaggagccccaagtgcacttcaaggtggtgagaaaaacgtccggtggcagcaggaagaggcaactgacaatcaacgtcgtcaacaacggcaaccgcggcaccggcagcggcggcggcggcggcggcggcgcaggttcttacccccagaaacaccacttacacttgcatgcatgcaatatatactgatctgaaattgatacagtagcttcctgcatacatggtccgtgtgacgtgtattgtaggagaaaagaatccgatgcaataaattctttttgttttttctttacttccaactttgaaacagtattttataaacgtgaaattgcaaaaaaatatgaaaaaaaagtcgtttaaacagattgtgcattatcatttttaaatc

SEQ ID NO: 50597 - DNA, 794 bp, Oryza sativa
acgacagatttacaactagttttttttatactagatttaaaactagttaagatgtcgagacccaaaactaacaacttggatccgactgagattaatgtatcaatccctggatcagtaaaaattgatacatacaatataactggttcttcattgcatacgttaaagtcttacaatatcaagggttttacaataataggtactcttctaactgattaatacacagcggaagtttctatacattctgactagtgaggtataacctttagggattttctaaattatcgaggtcttcgtagtaatagtcataagggtcctcttgacccaaatctgaaaaagggggttataagagcaaggatgagtattcacaatactcagcaagttatctcggaaatataatatgcattgacatataatggggttctttgcaaaaaaaaaagcaatattggacaatctggaagaattatagcaagatttataaacatataaactttaagtttctaaccagggtaccatatgagtcccggtactcaattcgaatagtttcaaagatattctactgcagtagatgtacgctttacccgcagtccacgacttgctgataattatcggctttagtcatggcccagtattaagtcattaacaattgtggcacctgttccatgaacttgtatcctcatatgctctgaacgtaatattaacagcagcaagaggagttctggggttcccgaggtatttaaggggaactgatcgtatgacaccacgtcatctcgatcagggtttagaaatataaccat

SEQ ID NO: 50598 - DNA, 2767 bp, Oryza sativa
tttaaataaaatttaaaaataagaaaatagggaaaataagataaaatgcaaaaaaaataacaaaaaggggtccaaaagatagagaatgattttagaagaatattggtccaagtttcactggaattggatctatattttaaaagatatgggcttctaaagtttgaaaattgaataaaagagaaatggcactgtgagcgggtcccacctgtcagtctctctctctcttctcttcttcaacctccggccgttccccaaatcgggccagcggcgctagggtttaggattgcggcggcgctagaggataaaagtagttgcggccgaggaggggagggagctagggatctccggcgacggcgagcggcggcggaggagttaatttggtgcgtggacggcttagcggctagggcggcggtggcacggttaggccgagatagcgatcaaaatgataagggttagacatggctaggggaggggttctagagcatctacgaggtatttagagggattccgacagcttgccgacctttggcaaggtgcggagaatagttgccgacgagcacctccataggcgacggtcgtgctcacgtcggcagctcagagggtggtgtgttagtgcaaagggattgctaaaatagaatctaggtagtatgtagatggttgaaacggaagaactcaccgagatcggttgaaacgacggattgcggccggaaaaacttcgcggcggtgaagaacagagcagcgcgggggcggcgatgctcggcttgatgcggtgaggtaaaactcgacgcagagctttggttagggcttagtatgctagaacatggctgatataaggtgttctatgaggtatttagggcggaggatggatggagaagggtgaagtcgatcgcgcacaaggtgttcgaccgacgggcgagggtggttggtgagacggattgatgaagcagagcttcggggttgaggggctatggtcatggatgatcgatgatggacagggaagggattggggtcctatttatagggctaggaggagcggatgagctcgggcaccgtcatcgccatggatgagctcgagctttggatatggttagggcggcagaggctgagagagggcgggcaagatcaatttgagtggcgggaggccacgttcgaatacttaccggcgaaggattgacttgaccgcggttggaatcggctggcgacgtgttggcgccaatccgagcacgacgcgcggcagcggcgagggtgaaaacagccggcatgggggtgaatggtttgaattgagggaggggataccaccgtctatcttcaatctaaccgtgcggcaagaattggcgcgattcatcccgggtagaaacgaaatcgcactcggcggcggcttggacgggagcgcacggcgtcgagcagtgatttcgtgcggcggtcgtcgtcccggctttgtcgtcgtcgagattggtgcggcaacggtgggttgaaggcgttggacgggcggcagcgcgccaaggcggttgggcacgcgcgatcgatcccgagaccgacgcgcggcggctcggcgcgcggcaaagtcggctgctggtcggcgcgcgtgaaagggaggaagaggtaaagagaaccacggttttgagtgggatgtggtcccctaggaccaattctaaactttgcataagattgggttggagttgggctgctctagctgggctgggcattctgtcgagcaccttgagtgcaatgaacagtagatttcaggaattttgaatatttccctagaaaagatttgaattcaaactaggagtttggaagggtttcactagggtttaaagtatggcaaatccttactaacattagggtgaactaagaaaataatctatggtttgaatttgagagaatttgctcaaattcactagggtttagaataaagggaataaattggaagggttctaataatacttgaaccaattttgttaaataaacaagaaatagatttttgaaccaaacaaatttaattaaaagccagcatgatgcagtcaaattttagtttaaaatttgaggatgttacataagattataccatgtaatttctcaaaaaaaagattataccatgtaatcaaattatatatgtcacatgtaaattttactcatcaaaatattatactttaaaagtgatttatgatcaaaattaaaatagcactaacactcacaagtcacaactattcaaaatgaagggagtatatgcatttcggtatgtagcaccagcctaaaggagtatatacaggctggctaaagtcgaatccaatcgatgatagatgtagcgctgcatgctatagcctaaatatagcattgcatcggaggaacagataagcatccaagattgctagcaatatactctctggtatgtatgcaagaaaacaaaaataaagaggaaacatcaaaatattaacagtaactacaaaataaaattgatttttttaatttatttatttttaatgataagggggcggggaggctcctcacctcaaggatggtaaaatacctctagagaaaaaggactccccactataaaaacaacaaagctagcagtcaaacgactatggaatagagttggcatctgtaagtggctagtaatgtgctgcagtgtcctggttgggttggcatcttctgatatcaaaagaaataaatcaaaaataagccagagtaaaacttaattagttatctgatagaaagtcatatagttttcctaacagtatgatttaaaactctgtataatgat

SEQ ID NO: 50599 - DNA, 570 bp, Oryza sativa
tacacagtcaattatttaaagctgtaaaatgtcttttcccacataaaacaaaacaaaactcttactgcatttactccttgtcttttccagtggtggcgacgcactccaccgcaagcgctggtctgcgtgccctctccggcgacaacgtggtagaaatccaagccatcctctgcgatgtccacaaggtggtctcctccggcttcgacttccgccgcgtcgtcgagtccgagcttcgcatccccgtcatctaccgtaagcacttaccattctcttcatccaatgatcgactataaactatacatgaggttttctctcatccgtgaagcaatatatatctcttgatatttgagatgtactttttcatgaacgaatttaaaaaagtaatgctaaaagttagaatggagttgaaaacttatctttgtaaatagtcttgaatttttatttcatttttaaggtataagtgtatgagttagttgggaggtagatacctccaccctgaaggaggtatatacctcataactaatactatgtggtatttatctatatacttccaagactcagaaatgccta

SEQ ID NO: 50600 - DNA, 1151 bp, Oryza sativa
cgtatatatactggagtaccttttatatagttgtaaccagtacattaaacaactttgttttggaagtagtacggtatatatatactactttttatttagtaggagtgcatactttttattatttaataccagtatataaccttatttattaatgtcagtataccgatctattggaatgagtatgtactgctctttccttggaggaagtacatactgatatattttttgagtaagtagaagtatatactgatctcctcttggaatgagtatgtactgatctttccttggaggaagtatatactgatatcttttttgagtaagtatatactgataacttgtaagtaaatttgaattgtgagcgacaatccaaccaacgtacgtgcaatatattttagccttagtgtgatgcatatgctactttttcatagataagtatatactgtcatttctacgtggaagtatgtactgtttttagtaaccacagttttttataggtagcagtttatatatactctttttttaagggttcaccagcagtttatatactagttctgtgtggtagcagtgtatatatttttttttatagcagtggtacatacatttttctttgtgtatagttgtagtttattactagtttttttatagcaatggtacatacatttttctttgcgtatagttgtagtttattactagtttttgtgtgtaattaagtacgtacatacttcttttgaaatagtaatggtatgtattgttgtttttttttaaaaaaaaatctggtactacgtactagatcctaggttggagtttatactttcttttttttttctttggtttacgaatccaatatatactgctctctgcttggacgagcataatatcgaaaatttacaatgcgcaggcagcgaagcacacatactgtattgctctttgaagtagtatatacctctatccattcaaaacctgttgaagtgttaggatatactgatttcttcttaagatcggtatatactgcagatttcttcttaaaatcagtatatactgatttcttcttagaatcagtatgaatcggtatatactgatttcttcttagaatcagtatatactgatgtcttccctgccagaatgagtatatatatactgatttcctccaa

SEQ ID NO: 50601 - DNA, 727 bp, Oryza sativa
tacacccgtaatattgccacaatgagtgacattagtaacaaatatttttattattattttgtgaataaaaatgagtatcagatctaccgtgggagaggtaaagcgagtcctactgtacattttagccggaaattatcagtatcacttcctgctcaaagttgaaagccccttcctcaattctgcacttatacgttaaaggttcttgtgcggccttctctaaagtgtttatgtgaatgatattcacatgaacagcccagataaatggcaccgtatgccaacggtaaattgtactacactctccttaaaaaaatatctcaaactcattgtactatacttcgagggaaacaaataaaatagacatccattttctcataaagatgttttcatctaaataatcataaaaataattttaaaaaataacaagaagattaatatagatatatcgctcaacaaacttgtaagttcgtatccaacttctacaagttatatattttttagaaaaagtacgaatcaacccttgaacccgaaactagacattgctcaccctaaacttttaataccggacgaattacaccatcgatattgttttgagtggttttgtcttgagcttgcacacgaggtgccaacgtggtaatccagtcgaaaaaactccctgggcccacctgtcatacctctccctccccagtctctctgtctctccacggtggcactctctctccgtgcacgc

SEQ ID NO: 50602 - DNA, 2378 bp, Oryza sativa
  unsure (1)..(2378): unsure at all n locations
aaaaatagatacccttttatttttataggtaggctaaaagggacccgcctatgacaaatgaacgagggttgttcggccaagaccttcctatgaaaatcgattttcaaaggtagtggttttcattatttggctagtggacgagacatggatggaggcagccaccataggaatattctcaaaagatgttggaggagtgaatccggtaaaattggttgttgtgttcatccatcttgtctaacatagatcgttggtaactaaacagtgataattaacatgttttattgttaattagtgattatcatttcaagactagtgctaattagagatagttagtatgttttgttgtaaattagtatttattattaaagtatagtgataactaatagtggtaactaacatattttgtattggggtttatatccatgtgtatgtaataccagtagacactaggattgagttcgtagtcatttaatttatagttgtttaactgtatagggattgtgtatgtgttgtgtgggtagggtagacggtctactagatgatatgtgaaggacacaacatcttcggtttcatgtaaaaaaatgaacattttatttttaatatgtaagatcatttgtgtttgctgaaacaattgtattatttttttacctttgccgccatatgtgtggccattgatccaatcgtggccggtagataacctggcaaaataaagaatcttgaaagacattcgatgttagaatgtgtctcatgcatactggctaagactatacattggtgttattcctatcccaaccatcatctttgaccattaattacactcgttacaatcgaaccaacatccaatcattaattaaggtcgatatccttcatcatgtttcctattactaaatatttatgaaatcaaccataatgccctaaacctatcagtctgacttcgattactcccttagtccacaaatataagggattctaggttgtttagcaaagtttaatgttaaggttaaattactatgatgcccctaaagggaccttgaggattttgatgttgcctaggggatgaatagacatttcctaaattataaaaactttgcatcttaattagaactagttggagagtcctgtcatggtctggacaatacgaccaacacagagagaatgaaaacgtccttgtgagataaaactgtgacatcttggcccaattaggatatgacctatgtggcccatgagagttgtatgtacatatttagtaccacattgctagtttagcaagagtgaaaccaacttataagggtttgtccctccaaccatatcactcccagattaactctcatacacgaagcgatgacaaaagtgtaagtagggtagtatgtcgattggccttcaggctgagtgggtgaggccagcctactgaccttgcttcttgcatcggtcaggctagggtgccgggcttggcctagccctcctagcttcctggtctccagcccaacagttcggggcgagctgtcctaatgtaacaccaattgcttggtcggcctaggcactctggactagtcagttgtggttcctcgagaactcgtgcatttctaacttattttgactgacacttgcaaaatactgaggagattgttagtatttcttacattcacaaatactgaggagactgttaatattttcttacatttacaagattaatttgcaagcacccggaataccgttaaaaccattttaaccattagtatttcccaaggtattggatttatatttttcccaaggaaggtgatggtataaagatatgattttttttatgttccttaatcaactaataattaattcaccatagtctaaacatgggttaggataataattgataaggtagtggacacacaggagattcacctctaaaagaatatttaataggaaattagcattagaaccctataattcatatgtacttctatactaatcatatctagtatacacttaaggtacacatgtttacaacataggacttagttccaggcacccaggtactaccgagagaccactccctgctggtctgccagcgtggttatggcatttacgcactcttacgtcatacccgaacgtggaggaatacaagggacgaacaaggctgttaacacttgccacctatctcactttccgtggtgcacaaccatatctaacgacatttatctagcctaagcaccatgcttataccagtaaataatatcactaactcgnnnnnactcaccctaaggatgaacaagttggagctagagcaacctataaaggttattggattgttaccatagcatggatcgactagcctaggatgaagcagatatacaaagtatatactactcatagaacatatactc

SEQ ID NO: 50603 - DNA, 543 bp, Oryza sativa
ttttcattgatgagtggttcgaaccgttctcttctcacggcctttgtgtcattgtcaacaagcatgacatggaggcatcaatgaatagaaggagaacatctgttcctccattctcacacaagtctacacacggtgttactactcacttgttcactgatgaagtgattagaagaggggaccgaagtcactgaccaaggagaaggtagtgaggaaggtccagtatgggtgatgtgttgtgccaatattttttttcttttttttttggagtaaactggcgttgccacatttgaggatcaaaggttggctaacctatgttacggtgtgagcacgtgatatgtgttcttccaattgttcattttagccaagaaattacgagtggcatttctgcacaaagttgataaacttgcttagttctataggtatactttatgcatgcatgctgcttttaaaagtgtatgttacatatacatgatgcacacttggaaccatgtaaaaaagccattatgtgcccatggaaaaatgtacggtacacaattcaaaaaa

SEQ ID NO: 50604 - DNA, 777 bp, Oryza sativa
tggctagttcttggccactattcagaagtctctcccctagaaattatagcatcactcaagtagtacgaatcatcaagaagcaagagagttaatttacttgccacgtacttaattagcagctagatcacaatcagctcttcctccttttgtttcttacaattattttctcatcctatctcccttcttgttattgaaacaacataaagcaagaagccagattacaccagaggtagagcccctgatttgctcatgcatccccacactactacctcaattcccaagcaaaatgtaggaggtgtaaagctacacttgcaagcaagcatgttagcccaccaatgcaaaggcctaaagtgaaggggacgaaattgcccatttctgtatgggtggatcggtcggccattgcattgacaagccatgcagtggtttagggggtaaaggaaggcttagcatttgggcgtcaattgaataatggtccttggccatgtaaaaggggacatggatgtgtaaaggtgttgattttgttttgatccctctccctctgctgttgtatggtgcgccgttgtcattgttgggtgtgtgcgagaggattaaatttgatggcttggtggggctaacccgtggttcttgtccttttggcaccaagaaatgatggtggtgattggtgattagtttgtgttgtgtgtagatagagtactaatttaagcagaggagcccatctatatctgacctttggaggaagccactaatgcgataaccaagtactaggagataaactct

SEQ ID NO: 50605 - DNA, 1407 bp, Oryza sativa
cttgaaaatgggttggaaatggcgatgctgcccctctctcgatcaccttgtctgacggtgaaaagaggagaaaaaaaatgggggcgacaggttgggtttggttgtggttgtgggggtctctttcttacggattaagggaggaggagaatgatgcaagggcgtgcgtacgtgctttgtggttggggattgttagcggcgggtaagggagggagggtggttttggcttggctggcctaggtactgtgtaatgtaatttggagggtggatgcctgtctttaggttagggaagcttgcaagctatttcaagctgggatctactattatacacaagggaaaataggggtgaaaggttttttttattcatgtggaaaaatattggaggtaaacatggattaaattttactttgtattgtatttgaaggatctttaagattgcacatcgatcttgcttgatacggtttagggtttcgaaacgtgaagagaaccactcactaattgtccttttataagcactgttgttgagagatgcattttgctagtgtggtggcaaggggtgcttggtttcaatcccgatgtccgtgttcaatccccaacacgcttataatttcttcttaaaaaatattgtattattgagcaggttcgtatttagaaattgcaaatggaaacaatcaaatttaacgaaaaaaataaacaacaactaaaaaaaagtatttattgttgacaaatcaaatgtatagaaaaaaacaaactaaaaccgaaaatttaggcccctttgattcaaaggaaattcataggaattttagaggatttctttcctatatgaatttttcctatatagccctttgaatcgaatgaatggatcttatggaatcctatgaaattcctatggattgcctaatgccatgcaagttttggaggaattctaacatgaggtaaaacctcttggaaactttcctttgagtctttatctctcctctaattcctgcgtttttcctacggtccaatcaaacgaccattcctgtgttttacaattctctgttttacccttacattcttatcaaaatcctgcgttttttctattcttatgtttttttattcttgcgattcaaagaggccttattgaatttcaccgatatatccgtacatcacaattgagcactagtaaccacaattaccgattaaccaccggacaaatagcaaaattcagtgtacgatgttattttgttggattttgatttgaattcgtgtacaagtagctcagatggacgtcaaaattttccttggctaacaacaagttgcagcaccatcggtcaactcaaacgaacgtcaaacatgcctagtagtaccgcttaaaagtaaacccatactatgtactctttccgtcccataatataacaactagaatat

SEQ ID NO: 50606 - DNA, 3929 bp, Oryza sativa
ataagtgattcagctatttcgaacaaaatatagcactttttttgagggatttttttagggaaaaaatagagcacttttatgtgtgtaaccgagattcttttaccagattaagaaatctggtaaaagaaccgcgctgctatataaaggtgcttctcaatgctatatcccatccacactccccacgcatttatatgactactaaagtttcgcatttatatgactactaaagtttaattaggttgtgtttagttcacactgaagtttgaaagtttggttgaaattggtacgatgtgacagaaaagttgtgtgtatgaaaggtttgatgtgatggaaagttggaagtttggaaaaaaaaatttagaactaaacagggccttagtcagtttttatttaaattgcacaaagctaaattaggatccatataattgatatacatgtgttgtatacatctatagcaatcaatccgtactaatactttttggaccaccgcgatcaaacagtattttttttctctctataaacagcggataaatttaattcggttggttatttttttaaaagggcgacgtggtttgtctttgtcccgtaatctctttatcttttggaactatctggttacatgtattggatagaagatgtaaactattttaattatcttcaaaagacgtacgtactcctagtttatacatacggtagatttttacattatttacaacctgtgcttaacaacatagtaagatgtactcccttcgtcccataatataagggattttaattttttttcttacaatatttgaccactcgtcttattcgaaaaatttgtgcaaatataaaaacaaaaagttatgcttaaagtattttagataataaagtaaataaaaaaaataattcttaattttttaataagacgagtggtcaaacatcgaaagaaaaacacaaaatctgttatattacggggagggagtaattaaggactgtagtagtactatcgtgatcgtgacgtcggttggcgatacatgaatccagctttctctataaagagatgcttggatggccatattttacacctctcgccgactaaatcctctgtttattcgagtcatcaccggattggttagtttatagggaaagtggtttagtgggctgcccccacgaagcacagcaaacaacagggtgtgttcatcacctacagaaacacgatttgtttatcggtttgggggaaaagacgagacggcgacgtggccgctcaagtggacacattttaatagcataaatgtagtatagtactagtagcatgattttttggggggcatctctatcaacagaaaatccttaaattacacctaaagttgcttcacaaattggtgaggtccaggcaaaaccaaatcgaacgggatattgtttttttcttcaaaaatttctgtccatcatctctccagagccgtgacacatgcaccaccatgtttggcatgatagggagaatcgattttgcttatcaagaaacagagaaaagatcccactaggttagtaggtgtttagtgttttcctccccctactaatcaatggttatgaccttaattaattgctgggagccaggattgggtgaactgcccacgtatactataatgttatgccgtatgtaagtgtgtatgagaaagagagaaattatatactccctccgtactcataaagaaagttgtttaggatagcgatacggtctccaaatcatatctttaacttcttatttctataaaagtatttattaaaaagtgatatatgtatacttttataaaattatttttcaagacagatctattcatataatttttatattttcaaactcaactgcttgagagttattcatgatttatatccccaatgtttgacttaaatattgtcctaaacgattcctttataagtatgaagggagtatgtattgggaaaggaaattggtgcgatgtggtgtggagttgaggacgcgtagcttcattcactaagatttaattcctgatgtctataaattttacgcacttaatgtaagtgaacttttaacagaaatatagctgagattagaaatatgcctgttagttttcgtcttctttaaacgtgtattagctgttgtgtaggtgagtatggcgttacgctgttgcgtatgtaatggtgtgcgtctaccgtgtaatagtaaaataaatgacatcgtgtacatggattatcgctaatgacgccattggattagtttaggttgcccatggagcctaaggtcccctaacaccaaccctaaacccgtaatttaatatcctctcgtgaatgacagcacggtgacgctgtgctgcgtaggaaagccactagctggtgccgtggtgcagcagagcagcagcatcacgccaatgactcgaggcattacacaatcgattgatacgctgttgccttcttcacgtgcccgcgtcgcagcgagcttcgcctttccacacagagattttgtggagatcgcattctcctctcctgtgtaaataagtggctgatcacatgaacgacaatgggtggcaatttggcaactggcaaagcatcgcaaatttgcagtgctgcattctaggatagatatgctcgtatcaccaaaaagagagactttaggaagccgacgagttccaaagtagggactccctatgtttctaaatgtttgacgccgttgattttttttaaatatttttgaccgttcgtcttattaaaaaaatttaagtaattattaattctttttttatcatttgattcattattaaatatacttttatgtatgcatatagttttacatatttcacaaaagtttttaaataagacgagcggtcaaacatatttaaaaaagttaacggtgttaaatatttagggaacgagggagtaaatgactacatgtatgcgcagtagcattagatctcatgcaatcctccttccccgctgcattgatacaagaactgaaaaccaaagcattagaaatcacaatgcagtcacaacatagatcgaacctgacaaaaactttgtttcaaaatactccaatcgatagtatttcgtttcatattatataagactctctaatattgtctatatatatatatatatatatatatatatatatatatatatatatatatatatatatatatatatatatatatatatatatatatgtgtgtgtgtgtgtgtaatgtgttactgattgccactttactcctagactatagccaacccacatataaaaggggagcaaaacaccttgctgaaaatcagaaaatgtcctacacaaattttacatctcaaattagggatcaaaacatttagaagaaatataatatatatcaaagaagtcaagacaaccaaaaagttctttcttgtaaacaaatcatatagaaagcacacatataagaacagtacatttttcattctcaagaaatgcccatgaaaaccgacagatcacacaaacaaaaatattttattcaggacacaagtacctgaacgcatttctacacgttgtagacacaatttaccgatttatagtgcatggaggcccccaaatatcatccaaaattaatctaccagcgtagtggagttcggacaacatcgccgttgcccttctgacggcctttgcgtcgtcgtcgataatcatcacatgaaggccatcggggaagaacaagatcatctcatcctccattaattactaaagagattttctttcttttttgtataacatggtgaacacgcgtacacactagtaaatatgcaacatcacactcacacctaacacaagctcagagttttagacaacacaaacggtttactgctcagttttcactgacgagagtgattagatttgaggtgagtgaaccctctgtttgtaggccggctaagccagggggatgggttttactgcctaatggtgt

SEQ ID NO: 50607 - DNA, 1018 bp, Oryza sativa
atatcacaaaaactatgtggagtagcttgcaagtgggtgagttgagggctgaagcattcataaactagatcgaacatactactcgacataaccagggataaaactggacagctctaaatttaatatacttgtgctaccaggttgccaggggccatcttccataatgaatgcttgaataaaactagcttgatcaatttctttatgcataggacagattgttctaagtaatgcaaagttcaacacagaaactaaagtctaactaaaaaattatatcaatacattaaggaataaaagtataaaacagtactatgttcaataaaaaaacaaaaaagaaacaaagagagatgtttttccttttctttttttctgttttttttgttgggaaagggactggttctaagaagagtacaaatagatagactgctgtacagtcggagcttacaatgatgaagagcccagactaccgactaaatgccatgtccaaaaactagccctcaaatgctctatttgacaattgatcctcatccatggaagttatttcaaatctcagcaagtcctttcagatgactgaagaaaactgtttgctcaatgtgacgacagttcattgatctccaatacaaccacctccaagtatcagcatggtggtttatcaaattctggctccaaactccttcctcttttcttattttcttctctttttttgtattttcctgcttttagccttttttacaaagcagcatttttttccataaaccatcttccaagcttattatgctgattctaatatgctgtatgatgggctaggcaccaatttggttctcatcatataaactataattcatctcccctatgtggcaggaggaagcacctgttcagcagaaggcagtgccacggttgcacctgtatttgaatcagtaactgaaggctcccgtttccattgtaaacttctagcaccagctatcattggagcacgccctctgaaggtgctaccagggaggccaccccttgggtatgccat

SEQ ID NO: 50608 - DNA, 518 bp, Oryza sativa
tgcatgagtactgaattttttttaaaaaaaaatcaaaggatgattccagttataacccagttactgttcaaatgtactgtattacatctgtaacttttgttatttcttactgtaactgaacgtaaataaatagttctttatatattttgtaacataattagagcttgttatactatgggaaagtgtgttaatgtggctgcatgaatactaaaattttaaagaaatttaagaaatgattcctatacaaacccaatacagtttgatgtacagaagatacatctgtgacttttgttatatggaactgtgactgactatagattgatagtttttgttacgagattttttgaaaaagttacatacttttaaatacttgatctaaagaaaatttctatttcaagcacttttctccaaaagaaattcactattccaagtgcttttctccaatatttttacagaacttgagttgtttttgtttgatttaaaagatgactggcagaatatggtgaagtcaatgggga

SEQ ID NO: 50609 - DNA, 967 bp, Oryza sativa
ccggcacacacaccttacccctcaccgcatgcgcagatagaactgtacccctatacatggaaatggctataaatgactatgaactaatccctaatgcctgcgaatattgtgtacatgtgagtgtgctttcaatatgagttctgtgaggtaagaatatattttccacgggcctccatctcgttaagcttggattaggacttaggagttgcactcactcttgtgtgcgtgtagtatacgtgcgtagtggtatgtatgcatgtgcttctttgatgtaatagaaaatggctaggaatttaaaactagcctgaggaatgtgctgatgtcttgacaagcaatatcaatcaactgaaacatcccatgttcccactcatagtaaaccgatacggagaaaaaatgtctacatatatatatatatatatatatatatatataccatgatctgaagaaggaaacgtgaccgagtctgaaaaaccgaacaaaattaaccaagactgaaaccaattttttttcgttagaaatctggtcagcctttttcactaaccgaaattaatttggttgtcaccatcggttaactgaaatgaaaattaccaaattaaccagaattaagaaagaagcctaacattcattgcattgaatggatttggaaaatagtattccaacattcattttatttgtggataaatggagcatcctaaaatccctaatatctgtggatggattgtttctcaccttattatacctatgtaaacttattcaagcctgcaattacttatttatgacaaaaaaaatatgtgcattcggagtattaggatgtgctgatgtcttgacaagcaacatcaatcaactgaaacaccccatgttcccactcatagtaaaccgatacggtgaaaaaatgtctacatatatatatatatatatatatatatatatatatatatatatatatatatatatataccatgatctg

SEQ ID NO: 50610 - DNA, 653 bp, Oryza sativa
tcgtaaatttgtagtactagaatagaatgcggaagtttgtttaactcactcgccggtgcgatgacacacagccacagagatggaaacctgtagcgcataacgagggcctctccaaacatttacatacgcgacgacctgacacgaaccaccgcgcaacggatcggcacccgttccacgcgtctacgcgggcaggaaaactcgccgattcccaactcccaagcgaaccaaaaccctacatatgtgatgcatataaacgagcgcctccgctgccacttcacaagcaacttaactcgacagccaacaatttgaagctttgaacagatagcagatcgtacactccgttggtgtagaagccgggttttacaacttttcattattaaaagaagtagagcagagtagtctccgttcctggccgatccaccatggcctccttcttctggcctgggccgccgggagcgcagccggtgggcgacctgcaggtggcgaagttggcgctgctcgtcgccggcaacgggttcatctcgccgtcgtcctacctccgccgttgctgcgacaacaacggcccgtgcttcgtcgacggcgctggggaaaggtgcttgcacctggccaacctcgtaaccgccatgctcgggctggccctcgtgctcggccaa

SEQ ID NO: 50611 - DNA, 1377 bp, Oryza sativa
tggtatgttcacttcctgggttgttctttacaactgaagcaaatttatgattggagctacatttggagtcacttttttttccttgtttcatagtagtataaaagttactccaatgtagtttattttctttgcaaattgtttgtccgaaacgtcatctaattatacatgtcatgcgaaaactacaagttacttaaataaaatctatttttcaggtttaaataattataactcaattaatcatacgttattttcttattttatctgcacgcagttacattttcagcagattcaaaagggacatctagtagcataaacactcacatactcagagaaaaccattgacctgagtaatgacccggttagtcactaaccgggtccccgtaggaccgtaacgaaccaaatggagcagcgtcccacgcggataaaccacgtcgtccccgtcgatctccacgcgcggctgccagagtcgatcgtcacctcggctagctcggtctcgccggtgacctcaccgtagacgacgacttgacctgacgaaactggaaccaacccaacccaaccaacataaacgagctcaccccgcgctgtgtgggccgccaattcacaaatcacaagcaagaacacaccaagaacccgaactgtcctacctcgatcgatcaccagcagccagccatggcggccgtcatcgacttcctccagttggagccgccgcgcgagccgcggccgcagccggccgtgcaggcggccctccccgtggcgaagtcggcgctgttcgtcgccatcaacggcctcgtcgcgccgtcctacctgtggtggtgcctggcctgcgacgacggcggcggcggcggcggcggcctccgccggcgctgcttccgcggcgaggccggcggcgacgtggagcagatgtggtaccagatggccagcttcgccaccgccgtcctcggcgtggcgctcctggcttttcacgtggcctcctcctcggcgccggcggcgatggcggcgtggctggtctggctcaccaaggtcttcacctgtgggactctccagtttggcctcaatattgtccacttttgtatcaaaataatttacttcaagttgatacgggggttggattctaatctttcgaggggataattataacacattttttttactgcttggatgcaatgccgatagctgtaaatggatttgaatcgatttgagtacataataatgtacgaaggtagattcaattttgtcagagctgcggcgtgctaatgtagactccatcgtggctaattgacggaataaacgaaacggtatatttgcaaacggaaaataatttgtaaataaaacttttatatacgtgttcttagcgattcaaaacaaaggctgtaaaat

SEQ ID NO: 50612 - DNA, 1869 bp, Oryza sativa
ttcagctctgttttctttttatcacagttatctctctcgttttcattttttcaaaaaagatgataatagtgaatattattccctcatttcttgacggcagcattaacgcattggatgcggtaagcggattgacctgccaccgtcctaatacttttcttctactactactatttctctgcaaaaatggatggattatactgtgactctgtgagccgtagcagctggcacaacgactttgaaccgaccttggatagtggatgcattgtaactgtacaatacaatttgtacaggaggagtgtatgcttgtaactgtacaatttgagctgcatgtctgaaaagatcgccgggcacgagagccatggccgccgcgtcgtcgatgggttcgagagatgggggggaaaagcagagcacgcctacgacgtggggtgcatggctcgatgcgtgggcgtcggcggcagcaaaagggaaaaaaggagagatccgtctctgctttcgcgaagaggaggaggtcacggccgtccgatgaggaacggatggctcagatatcaagcgcaaacggtgacgatgctgacaagaggggagagattccgtgcatctctccatttcgaattcggggcatgggggcggctcgctccatctcctacccacacctgagatctggcgagcgagtgacgacgtgccgaccaccggccaccacaataatattgctcggtttttcttttttttttgttatctaattatcagccgcaacaatttgaaatctaatatttgagttgattttgaatttttttatcgaagtttaatttttatattggcttttaatcgttaaaaatataagtacaagagttgtttacacataaattgttttttactttatttgtttatgtggtgtttggattcaggggactaattttagtccctatcacgtcgaaagttggaacactaattataagtactagacataggctaatgataaaatccattccataaccctatactaatttgcgagacgaatttattgagcctaattaatccatgattaacctatgtgatgctacagtaaatatgtgctacttatggatgacttttgctttaaaaaaatcgtctcgcgaattagctctcatttatgcaattagctttattattattaatctatgtttaatattcctaattagcgtccaaatattgtaacgctccgcttttcgtgagtcgttaaaaactaactcggcaaaatcctaattgcgaaaattttcgttctttgtgtgagagtctaagttgtgccaaggatcccaatttaatctcgttgttccctctcatcgaaatcaaaatcctccccctcatccaaattccttttccgattcgagtctctgaaatcaaattctgaaattcaaatccttcctttgaatcctcgccaaatacttctacgaatccagaattattcaaatcctgcctcgaatcctttccttgactccaccctatgttcccgagaacaaatacccaagtattccttttgaatcttttccatgacttctccttgagtttcccttgatacatccctaaaccctcgagttcgaatatcaaatttgaattcgaatccaaaccctaaatcactccaattctatccaaatcagttttctctgtaaaagtctactttacctccctgtatttttggatggaccgattttcctccatcggcccatctcccctcccagcccatcatctttccccctcgcacgtgcgttgcacgcatgcgagccgagagagagccgtcgctcgctctctctgtttctctcgctctctcgtcttcctcctctctctctatgtttctctctctctcgttcgatctccctctcctcggtgcagatttcc

SEQ ID NO: 50613 - DNA, 907 bp, Oryza sativa
aaattgatagggctaaaattattccctcccatctaaacaccaccttatttttcatgtcttatccattgtggagcgcaaacaatacgagtgcatgactacttcgatctggtgtgttcttgtcaaatgttcagatatgctgacttcttgcgttgcttatgcgtcatgaatatacagatttttgcactatctgaagctcccaacatagtagtacatggctacctctgaaggtgtcaaactgtcaaggtgatcgaaaaggaatgctaggctgctaatttagcttcgacgcatgttcagttcgacagacatgctcaacgtgtgtacacatcgaacacactgttgtcaacgtgcatgaatccgaaaatcgcatgaatataatgcatccatcgttaagttggcagggcggcagggccctacgctcgtatgcatggctgcccttcctcagccgagacgaaggtgcatcacacacgcacgagaaccacgcgtctggtctgaccatggccgacctgacgaccatgcatgcgtgtgtacacgtactagcactctctgtattctctactctatctgaatctctgatatcatccaggtgatgggaatggttatatggattggattaacctggacgtcattttaatttggatctgtctgaccttttcccggccgtctcgtaatctcgttacagtgtcaacgtgcagacggctagcggcttgtttttgtccgagccgtttggaccatctgcagagcggcgttatgccttctgagtttgaccagcgtgtgtgtgtgagtgtgtccgtccacaccgattgtttcgagtcaaaattggctacagattcacatgctcttttcaactcctcggtatgtatatgtgtttttttgatacttgaattcgatttggtttttcgtattatct

SEQ ID NO: 50614 - DNA, 948 bp, Oryza sativa
tgaagatttgtcaagatttccttggtgcagtttttgttggacagaaattgtgtgcacagctggttgatgagcctaggattgttggctctggaggtgacagctctccaggcaaagcttgtggacaggaggcagtactgaatgaggagaaggctgaggaaaattctcaactatcctgcagaaatcatgaaagcaatcagacatgctatcaaaatggagatcgagaccttgaggcacatctcaatcaggatggatcgccgggctggagccttggagggatgcaacacggaggagcgagatcgaaggcatggctggccggtggagctcgatttttcgcgtcgtcttcggttcaggcgtggattaagctgcgtttgggattttctcgggatgcggtgctagggttttgatgttgggtggcatggcaaactcatcagcgacgccgtggcggcggcggcgcaccgccggagcggaagccgggagcccgaaggagtttaaggcccaccaaaggacacgaatgaacgccgactaaattcctgtcaatgaattcggcctgcatacattcagccctcgaattccactcagcgaattcgtcccacctaattcggaaaaagtacaccgaaggtccctcaatttgtcatcgggataaaaaacgtccttgaaccgtaaaaccagatatgtggggtccctcaactatacaaaaccggtcactcgagatccctcggtggttttcaccccggttttagcctacgtagcagctgtcagcgtgagacccatgtggccccacatgtcaggtgtctacgtcagcctcctctccctctttccctttttctctcccttccttgtctctctctctctctctcacttctgacttctctgcaatgggcggccaccggcgaggaggatggcgcgacgggcggccgcggccgcgtcgggatcctcgtcaacgtcgcg

SEQ ID NO: 50615 - DNA, 3300 bp, Oryza sativa
agtttaggcaggggcatgatggcttgggagttcgaggagatcacggaggagctcgatgtaataggggttgggcacaaagatgcactgggggcaacgtgtcgtgcggtccacagtggctaagtagaacagcgacggtggtatagggatggaaactgaggggttttggtgtacttgggacatggattttattcttaccattaattttgaacaaggacggtttggtggggggtgaattttgaggtttggacactgacgagtcgagttaggattcggcttcctagctccaatgacggtgattggcgctgctgagagcagagcagcttcagggagcaaggagagcatgctgtggcgtttctgtttgttggtggtggcgaccgatgaggcagttgggagagggagaacaacggtgaggacaagagagcggcaaaggagagctcacgtatgcgggcacgtttgtgaaaaaaaaaagatgggagaacaagaatgagttgattggtaggtcgtatattttttttttcacttacatggggtcttgtgtaaacacgttagcgagtcaactatggttaacctatcatattagtaaaaaccgctttctaaaccaccaaaaaagttaaaatgcactggttttcaaagttggaggatatgatttacacggtttgttttgctgttaaaagatgcgattcgaacaggggcaagagggaggcattatagattttagtccatttccctttagtatatttgatccacaactgaaattggccttgttaattcccgtcaactatttgggtctctaatgaatttggcctacctactgtccaatcaacgaaattgggcaactacggccacgaaagaatttaggaaaaagtacaccaaagatccctcaacttgttagccagatataaaatcgtcccccaaccataaaaccggacatctaacgtcccctaacttacaaaaccggtcacaatagatctcttggcgttttttgacctcggttttgtcccacatggcggctgactcaacgttgatctatgtgggccccacatgtcagatagaccacgtcaccaccaaggttgttaggatcgggatactaggcagtatcgttttgctcaaagtaatatcgtatcgtagaatcgtatcttagtatcgggatactatgagattttctttttttaagtttaattaatatttatattaattatatatagccattatctactactacttaaaaaataagaggtgcttctatcgtccgtcaaaaaaaccgagcgaaaaaaccaggtttgtccgataaaaaaactgggcaaaaaaaagtgcgaaaaaaagaaaagaaaaaccaaaactgtccaatccagaaaaaaaaagggcgaaaaagaaccgggccaaaaaaccaaagttgtccgatccaaaaggaatcgggcgaacaaaaccaaaccggacgaaaaaatgtgcgaaaaaaagaaaaatcaaaaaaaattccgattcctatggcaaggcggaaaaaaaatgtccgattcttatgaaaaaaagtggcgaaaaaaacacagtagatccgattcccttaaaagttggaaaaaaatcatattcctatattatcctatttcccgtacggttgtttgtttttcttcttttttttccgtttcttttccctttttttctttctttttctttcttttttttatttcttaatactatgtatgtatataaaatttatatacacgtatacaaactttatatattgtatattttttcttttttatacgtatgtatatgagctatgtatacttctctatctctactattaaaaaatttaaaacatttccttcgtccgtccctacttaaaaaattcatattaaaaaaggtctgtccgatttataagaaagtgggaaaaaaaggttcgtaaaaaataaaaaaacaaaggagaaaaaaagtacaaagggcgaaaaaaagcacggcaaaaaaaaagtccgatttctattcgtttttagtccctatatatctcttctctatctctaatctaatctaatctaactatttaaaaagaaaagttttcatagaacaactaaaaagaaaaaatgcgcgagaaaataaaaacggttaaaaaaagcatgagaaaaaaaaagcaaaaaaacgcgtgagaataaaagtcagaacagaaaagctaaaaaaggtttctgccgtctgtaaaaaataaaaaaacatgcgaggaaaaaactgttagaaaaagcacgccatttttaaaaaaatggtttgaaaaaacctcacataaaaaacaccgtttacaaaaaaaacaagcagctttgaaaaaactattagagaaaaaacgttaaattgatagacgcatgagtcggatagtatcaatcatttttttcatctcttaaacggcttttgtttcgtcatctatagaaattatattaaaaaacaaacatatttttaattattatttagagaagagtgcacatgtagcaaagtgattctattttgtgtagacttgattatacgaggcaatgtaggatttgattgatcctattattggttgcaagaatgagatcgaaaaagtattttagattatatgtatgttgtcgcgtgaataatccaattattttaggtaaagcaagcatcggtaaggttgtgatcgtttatgttgggccattacattaaagatgttccaattttcacccgttgcaacgcacgggtattttgctagtatattaaaaaatgtagtaatgatatatgtcatacaaatagagacatttatcaaaagaaaccacgttggtttgatatatttaactgatttttatataaatttgagcatatttattcacattattttcaaaccatgttttcttaaataatattttgtagtatcgtagggatcgtcgaatcgggataccacctaagatttcgtaggatcgtgtaggatcatgtagtaatgaatagtagaatcgagatactatgaaaattaggatactaggtgggatcggtatcgtttcggcttggtagcatcgtagtattgtaagatactaggatacgaatcgggatactgataagcttggtcaccaccctttctatttttcccctcttctctcccttcctctctcctttttcctctgggcgtggatggcggcagcgtcttcaacgcggcgtggaggacggccggcgtggccggcggctgacggggaaggagcagcgcggacaggagggccgatgggacgggcggcgccgccaatggctgccgtcgcgcgaggaggagcgcggcggtcgtcgtcggggtgaggcggcagaggaaggggagattgaaga

SEQ ID NO: 50616 - DNA, 2100 bp, Oryza sativa
ttcttttagcagcgcatcgatcggagtgggccgccgccgtgaagctgacgccatccgccgtcgccaagccgatcccgaggtcgccgtcgtcgtccaagcttcaccaagtcacgagctatctcgactctcgagtaagcacctaagaacgccgaccctcttccccaccgcgtcagtgacgccgtcgccgccgcatcggccctcctctccgcatcggtgatgatggctgtagccgcgcgccgccaatgccgaccgcacgagggggacggggaggccggcgagctcgcgctgccctaagcccgcgcgccgccacccgggagctgccgtcgccagccacaccaccctctggccgcgcgcgccgccgcctgtgcgagagcagagagcgaaaggaaggagagaaacagagaaagagagagggtgctgacatggtctccatgacatgtggggcctacgtgggtcccacgctgagtcagccgccatgtgggataaaaccatggtcaaaatcgctgaaggaactattgtgatcggttttataagttgggggacgccggatatccggttttgtggttgggggacgattttgtatgtgggtaacaaattgagggaccttgcgtgtactttttccaagaatttttagcccagctctttcgtctacgaattcggcccatctatgtcctagtgtcccgtttcggtttcgggcctctacagatggacaatgggccatgcgaggtgtatggtccacaatggtccggaccacaggagccatgccaagcgaaatctctgcgtctaagacatacttcgtacttccttttgtcacgaaggaagaaattaattcatccgcatgtagcaaacactagggaactatacgaatgcatctaaccaatgagtattaacatgttggctcaggttttgatcaataatttaatttagcatcatacaacgataatccctttacataacatttaaaatatgcgtagtttattataaaatactaataaataaaatatgtatttttggattaagaagcatcaaaaccagataatagaaaatacaggcgcgaccacgatgccatgactcggaggttgcgaccgggtggggccaaaactcgccgagttcgcaccggacagatcgatgccctttatttgcaattaaggtccttcccctgctttttggttttaaccttacatttttttccttaatcacttacttttgtattaacctattaattttttttggctttggctttatcttctaaaaattctggtgcaacacacgagcctttagctagtcctttaataaaaagcaataaagaagtcacactaccaaaactttctaacgattttgttatatacatctcaacacatttctcttaaaaatttatcacatataaatataatattattatagtgtgctttaatataattttgaactgttaaatttgttttaaaattcatattagcaaggaagaaaaaatcaccacatgcttacatgtgaggagattctattccgagaggtccgcttcgagaggtccgcttcgtggaaatagcatgttactgcgagatttaggaacattacatataagttgtatcgtagttacatgcaagttataatataattacactataattgtattatatttgcttctgtcaaatttttgtaattaaatttttttcaataaaatatatagaaagactcattttctaactgaaaagcacaccaacacatgttataactaggtagatttttaataatgtagtcattttaaaaaataatatcaatagacccataaaacacatcttacatatggaccctacctcagcagtgatatgttggtgccgagatgggatatctcagggctaaatactccggcgctgagggtctgatggcgccagtgaattcagcgtcgatgaattcggtgccaacctctcccatctagacctgcaagtccaattaatttgctgtcaaatttttggaagaattgataataatatatcttaattcattatctctaatatatttttgtctataaaatcttgatatggaggagaatgtgcatcctttcctccttataactaaatcctattgatttgctgtgaaattttg

SEQ ID NO: 50617 - DNA, 749 bp, Oryza sativa
acgtgtcttacttgaggaggagacagttggacacaacattttccctgcagtttcatttcaaccagcaagcactgccaagaggtcaagaacaaaggggccacgccccaaatcagccaattttaagcaagaaaaaggccggaatgactgtggaagcttacaagaaagtgttattgcacacgtcgcaggataagataaccatcactggaaaataggcaccaaaactgatcaaagttcagaggattattcatatgttccatgctgtatggttcctcataggaaaacaagatatgtctgatttgtttgtgtggtgggtaaagataccctggaatttaacctcaaccaagatctgaatggcctgagaattcagttgaaaaattgaccaaagcatgtgaagaatgaacattgtttggcaatcaatttagagtagaaacaatgtgcatgatttcatttgtcccttattttaaaatgtcacagaaatgtttaagcaaacaagtaaatagagattaatagggttgtttcagtaggctgatgcagaaattcacggtttggtattcacacttataaataaccgtttcatacaaaataaaattgttaaggataatacacatctagttgcaatactgacataaattcagtagaaataattcatattatagaaatctaaagaatttgagtacactacaaaatctatatccctattaaaaaaagtagtggtggtgacagttaatctgctaccccgcctactctca

SEQ ID NO: 50618 - DNA, 1067 bp, Oryza sativa
cagaagccaagatctttatgagacgatccaatgataagtttctattaattcttttttttcctaaaaaaaaagtcaatctgctatcaaatacaattattaggtaggtcagcactggcataatttctatcattctaatccccttaaccacccaatactatatataaaagtagcatgtatacttaacttcagagagggagatatatagacaactacatgcccttttctttcatttttaaggaaataatttgagaaaactatatcgactcttgcacgtgtacttgcctctgaattctgaaaccttgaaacactgaccagatcagcaattaatggaattggtcagagaatttattagatgacatataaggtcgttgagttcagttaaaagttcgctcaatataatgaattgcatttccgctagagatacacttgcccaatcttactactacatttattttcatcagtttcttgtcttgccagcttgtacggttccatatgcattcataatacttgattacttacttactgcagattgacccaaatgattgttccagtttgtttctcttaagaaatattcctgataaggtcgctcaaattcaagtccgaatcagaaaaataaagaggcaataatcctgtggagagtacaacagctcatagtacaaattgaactatcaaaattaaaagcaactaaatttgtcattttcagttgagagagttttatgctctatactacacctggcctttttttttctctggttaactcaatcagagatgttcactgaatgtaccttagctgatctatcctacattttattgcatcccaaaaacatactgaagaaataaaactcagttatctttgccactggaacacttatcctacattttgttacatctcaaaaacatactgaagaaagagaactcagttatctttgcattgagacacttaactccacattaaagctacagtactgctagtagcagacacagcaaaagcaattgcacaacttgtaatagtataacacacaagccctatgtatacagctctacactgtgattaggtgtcatagaag

SEQ ID NO: 50619 - DNA, 2666 bp, Oryza sativa
aagacttcagcataagagaatacttcgataagcttcaccagccgccgccgccggagtcggagagctcctcgtcggagttctcgtcggagttctaatctatctaacgtggctgctgcctctgtactcctcctactttttctttgggtcatttttcggtttggtcctcgttaggttactattttgtaacgaaggggctgagggtgcgtgtatatacgtggagaggggcggcaatgtaaattcggtgtagaggctgtggagatgtgcaaaacaacatttttggagggctgtcgcacgtgcacgtttctgtatgaggctgtccaagccattttttttctgtatttttctcgtgtccttttttcagtgcctggcagaagaatttaccaaaattgtcacactgacagaaaaaagcttaatagtaaagaattttttttttcaattacatggattacatggaggacggaaagtcattttgtttacgatcttgtttgtcctttcgaaattgagtggtgaaaaaccatttcccatatatatagaacactaaaggtaaatgataagcaaaatagtgaaacgggttgatatacaattgcatgagttttaaaatatggtcataagttacaaatcataattaattatttcaagttagtaatacttttttttgaagttaattagtacatgcatctttaatcatataaaagacacattcatcacataattaaacacgggtttagtatattgtctttgggcgtgcttaactcctttgtttcgattttgtatattgcagaggagaatatttataattacctcccgtacatctctacaatgattgatccacgagcgctggtggttatatacatttatcatgccaattgcggttcgtacacatgcaactctgattaattaggctatgttgtttctgagctgttggtggttgaaatccttaacatgctcatctctcctggtttccagaattttcgattgacacgcatgtggcatgctatgtttaatctctggaccttgatttatataccaatgagaataatatacatactgcatttaatttttgggctaatgtgtgcacggatgacatgattccttaattaactaggtgaaaccccgcgcattgctgtgggaatttagtatgataataataaaaaataacatgtaagatagctatataacatcagattaagtaaattaatgtggtttatgataatttaaatttaaatagtatgtagaatggtgatttaaacgtaaaaagtaaggtggtataactttatagaagaagaaaaatagagagatagtttggaccgtagattaatcatctaaaggctaaaaaaaattgatgtgatatgacttaattagaggaaaaaaaagagaaagataatttggaccatagattaatcatttaagcactaactaagtgaggatgaactatataagtatataggatatgataaaacataataaagatatacattgaaacattatgtgaattatgttgaatgataatttaacatgtttgtattttaaaagctcttaaattataaaaatataaagatatagcatgtttgtatgatgtttaaatatgatgattgttagtggatgatgatgtggtatcttgttagtggatgatgatgtggcatctttgcatgttaagcttaaggagttagtggaggataactttacagtaagataggatttctatccacatcatattcaagacagacagttatttacaagctcattcattagagaaaaaaaatatatcattgtttagaaagctggagattataaaaagcagcctaataaaaatatgaaaaggctagattttagctcttataatatctagtttattttctgggttctatagcttccgattcttataatctatataaaagaaattgtactactccctccgttctaaaatataacaacttttaaccttcaagatttatccccaaagataacaatttctccaccaacattctcttcctaaccaaccacaactctccaccattcacttttcccacctaccttcactaatcatccaatcacaaccctccaccattcacttttacctactttcttaataaccgtgttcaactctaaaacttcttatattctgggatggagggagtatatatttaggggagttagagattatgagagaaagttgtagctatcataaaatattatctatatgtttatacatattcctattccttttaaaataatggattaaaattcaacatgtatatccacacaaccaattcctatacatatgaaatgctataagagcaagtttaataggcggctataagctggactataaacttacgtgaagaagaaagaacttgaaagagttctgctatacgtacgactctagtcgtatggcccacatctgaccagcaatcagtacacttaagatctctttatgtgggtctaggcatgtagtagcgtacactagttggacacaggtcggacacgttgtgtatagacatttcaaatttgaaaaataaagagagttggctctcatgcaagagctagctattcacgtatttcaagatgaattcattaaatacatatatgagaggtagagaggggagaagaaaaatagcgataaccttatacctcatctactatatatgttaaatattaaatataat

SEQ ID NO: 50620 - DNA, 3484 bp, Oryza sativa
agaaggcaggcgtttaatttgaccaaattaaatttggtgtgtgggcgcctaaatcttttgaacctcatcaatcgattagcgtaattggagaatttcatggagattgctcatggattaggagacagtgggccggtttgttttacacgttatggtactactgagtaagccatgcatcttcttcctaaaagcattaataagttgatgaatccacattcggcgtgaggttgcatgcatttagcagaatatgcgtgtctgtaacacttagtttttctttcaaaccaacactttggttttttgtggcacaaaaaagttcagttgtgttggtagccacgttcaggtatggttgaaggccccagtccgctcattaatatcaacacgtttgaaattagacagaaaaacatatcacagagatgaactaataggtctggctcggttaatcatttttccaaaatttagaggagatttatttcactcctatttgaatgtaaaattaattaaccatactcagtctcttcctatccctttctctaattagggattaatcgacaagggctagaaggtaaatctgatgaccaatttctcttgtttaattttgacaagatttttttatgaattaagcaaaataattttcacaggagaatttcctgcattattacaaacgggtctggtctgacaaaggtgctagaaaattaataagctgtcacactactaggtcagttatctataatattacctggcaatcatatcagcttattaattaacttgatcttgcctactctgtctcagctttgtccattcctttgttgtgcaagcatatctagattgagttttcagtaaattggaaaaatcagctacattgagtttaattcctaagctcaccacttcaccgtgtgatgcattatgctgacaatatctttactactgctgatgacagatcaggtgaagtcgatctcggacgccgactgttcagcacacacaaccatatctacattacactgaacattcatctcttttgatctgagatcatatatatatatatatatatatatatatatatatatatatatatatataggggtcacttcctggggatctatatcagtatagtttctttgcaatacaactactttcagattggctactactttactttcgtaaggtactgagaatctttcagcaccaactgatcgaacagctggttcatacatgtgccacgtagtcttctgatgaaacatggagatgtgtatgtatgggagctcgacacttgttccatttttggtcagtaccctgcattcatatacccactgtgtcgatcgtgaattcgtgatgcagtcagtctcagataatgacggatcgatgtaagtcattgcctctaaataaatccgggccggggtacattgaatccatctatatggacttttggcttcagatgataatgtcaacgagattccaattttcatattgtctcttcggaaaaaaaaagagagagaaattgaagccatggaattggagaaaagaaataaaaattgctagcaaaaacagagcaagttcatgccgaaaagggtagtttaccttgaaagtgttggagtagctcacgcccagccaggcgtgcatagaacgctggcgtggtacttgccctgacctagaaccaactcgccgccggatgacggcggtcggcgggcgctcgacgtcggcgacagagttgggcgcgggggatgaggacctcgccggacgccacaccgaaccttgactcgaagacttcggcatgcaggggaataagttcactttaggtctctctatttgtcgtccagtctgatttttgtccctgaaccgtaaaattgggtacgacccgtcccccaacttacgaaaaccgggcaaacgaggtccctcgacggttttgatagcggttttggctgacgtggcgcctattcggctaatttgactcggtcctcatctcacatggcactgacgtatcgcttacgtggtaattcgatccggaaaaataataaaacccatgagacccacatgtcaattgcacacaaaataattaaaaatggtgggacccacgtgggccccacatgtcatcctcactcctttctttctcctctctccccatctccttctcttcgtctctatccccttttcctctctgttctctctccagcgccaccaccacggactcagccgccgctcccgccaccgccacatccctcgctggtgatcaagatgaggttccacggcgtgccggtggatctcgtgtacgccggcgtgtgccttccgagaggagaagcgagcgatggcagtcatcgagttgtagtttcataggatttgtgttccaataattaagggatagagaggcatgcgatattatatctgattgatcagccttacaaatgatcttcatcttgtatcttcacatatgcagtggtggtttgaacacttagttagtttgggcatcaaaccagtgtagcactcggtgccctcgtaatcgttgcccctcagcctcccaacctaacagattgagctctcatctagaaacgaagagtggagaaataggaccggtctaatacgcgaaaatgtttgtggtcatcggcatgcacgatcgagaaaacaacaaaatcggtggcacctgcaccttctagatcgcgatgccatgtgcattttgaaaacttagttggcaatgtactggcaaatagttatacatatgaactttgtcccgacacctgggctagatattgtgtaagctattaagcatgagaactagaaatattcagccagactaggtctcaaataaaaattatgaattcaaatctaaaattactgtatacttagtgtgtttcgtagtagatatgcgaatatttcttgggattttacctcgcaccatttatttttaggaaaaagttcgaattatccccctgaactatcgtggtcgatcgatttacccccctgaactcaaaaaccagacattgctcaccctgtactttttataccgatgaattacccccctcgacccaatccagagcggttttgtcctatgtggcgtacgcgtggaaatccagtcagctttttatttattaataaaaatatgggaccacctgtgagactcttatccccctcttccactctctcttctctcttttgcacgcatggcgggcggcggtggaggagaggcaagcgaggcggggccgtggcgggaaggcaaggcgggcgggcgcaggtcaagtggcggcgggcggtcagtgtgtggggactggcagtgggcggcggcgcgggacgcagaggcgggagcggaggcgggaggccgccacctgcacccccccccccccccccgccgcgcgttcgtgaacatccggctcagcacgctgaccttgtgcttccctccgccgccgccgcgccgatttccagccctcgtcctccgccgcctcgatgatccgcactcccctccgaatgactgcgtgtaccagacatcagcctcccccaaatc

SEQ ID NO: 50621 - DNA, 1566 bp, Oryza sativa
  unsure (1)..(1566): unsure at all n locations
catcgcggctcgatcccgaggtgcccaacagcgctgctcctccacagcgtcgtcgcgcgtgggcatcgagaggaaagccggaggcgcatgaacctatctcgcttggcgacgacaggagagaaagactagaggtggagcgaactgtttggtgcgggtcaagcagaggcgggagcggaggcgggactccaagggccagcggctgctcttgtccctcgccggagttcgccgccgccgcctctgcgtcccgcgttgcctccgcctccgcatggaaataatcgccgaattcgatacaaaaccgggtgttttgtgactgaattcaaccctatcatatacagtatatttgatcctttggatcttgttgaacttaactaggtaagcatggcagctcatggcggtggagacctcgaagctgcagctgcagcgcagtaccatgcatgccgtcgagggcgccgatccgcacgaacacgaagcgcctggtggtcgtcgttcggtcgtcgttgttcgcgagattgcctcctgtggacactggccttgctggggctaaccgtgctgctgctatccacgaggctggccacgacgacgacgctgcgcgggaggttccgtaaccacgacctcggcctcggcgccttctccgtgcacctcgccggctacgagggaacgcctaccgctgctcgagagagaggaagagtgagtgtgtgtgagagagaggaacatgggaaagaggaggtgagagagtatgacaggtgggccccaccattttaaaaaatgaaaatgttgattagattgccacgtgtacgtcacgtaggacaaaccgctctggattggatcgagggggggggtaatttatccgatattgaaaattcagggcgaacgatgtctggtttttgaatttagagggtaatttagtcaaccgcgatagttggaggggtaattcgtactttttcttattttttcgtatattggcatatgaggcctattaagaaatgcaaataaagataaaaacaagtacaaagtttcttatcatatgacttgacataaaaatgttacatacaaaagagcacaagagagtagtggcatcattagtgccagtttttcaaggactggtacatgtgaaagtacatatatgctggtttctattgagaactaacacatactaccttcatcctaaaataagtgtatccgtggatctccgtttccaacatttgaccgttcatcttatttgaaaaaaatttaaaaaatagtcacacacaaaatactattcatgttttatcatctactagcaaataaaatactaatcttaaaaaattttcaaataagacgaacggtcaaacgttagaccttgaaccgggcgcaaacttggacctatttttaggaccggggggggtnttttacattttgtatggggtcgcttttccctgaccgttgcgccctatgccaccttatttgaggtcgatcttcatatgaccgtggcaatgacgtggcggcttacgcggcaatttgatttgtaaaataataaaatttgtgggcccacatgtcatttccactaaaaaaataatttaaaaatgg

SEQ ID NO: 50622 - DNA, 3702 bp, Oryza sativa
tactccctccatctcataatttaaagattttaagtttttgttggcactgtttgaccactcatcttattttaaaaatttttagaaatattatttatttttttacttactttattatccaaagtattttaatcacaacttttcttttttttatatttacataaattttttaaataagacgagtggttaaacactataagcaaaaccttaaaatcccttatattatgggatggagggagtaaggtttagtaggctgtgaggcgcagcagaggccggccatcgttgacactgcgtgtgggcccatgcatcttgaatactccggcttgccggcggccgagggcaaaagcgtaaatatataaagactaaaaaaaatacctgattgatccgtcgttagcataagccaattctctgatacgcacggtgactggagccggccggtggacggtggtcaccgacagctcctcccggttaacctgaagctgcaccggagtccggtcacctccctttataaaaatcaaaaagagagaaaaaaaaacaacaagatctcctttcttttcatatctgtttctctcttttttttctttgcactaatgacttagccagaagaatatgttcttccactttttttttgaaaaataatattagtataattgagattgtgctctaattggtgccaagggagaacgcatattagacctcacctgactgcatctgcatgcaccagaagggcagtaggaaacaaggaacaaacatgaacatctgggcccacttgtctgtgaatcacatgcagatgtgcaatgttggtagtggtactgaccctcatcggttacccgtattccctaataatctgttttagcttattaaggaataaaaattaatttataagtaaaacttttatatatctgttcgtagcgatttaaagctaacactgtatagaaattatgttgcggatatcttaaaatttgacttcaaaattaaactcgaaaatataaaatttaacttttgctttaatttattaggccaaccgatgaactccgtggtacttgcataggagcagctagtgtgtgtatagaaaattggttggggctcttgtgtactggcaacacagtagatggatccagattgtcacagcttctttttttttttgtcaacggcgtgcagaatgcagacggatgtgtgtaaatatatgtgtcgtgttgcgtgaggtggggactaatcaaggacccatcgtctcgtaattaggtgatttggtgatgatgagaggagggatgtcttctggccggtgcacaaacaaattttactttattagaacttactactgttagagcacaatggtacaaagtagtgtacttcaccgttttaaaatataacaatttaaataatggatattagatataatctagtttcacgaatatggttatatctgatctagtactatgttgctactatattttagaatgacgggagtatatgctattctagggccaaattgaaatttaacgttgttatagattaacctcaatttttcgtgagcacatttccttaattgctaaatgatgattttttaaaaaaagcactacatattttttttctaaaaataaaaataaaaataaaaatatatttaagtttataataattaatatttgattaatcacacactaataatttatctcattttgcgtgctgtcaaatatcccctctaaatgccagaatggatgtagccttaatttggttggttattgctattgtatatgtaatatcatagctgataactagttgaatactccatccgtcccaaaatataagggattttgggtggatgggatgtatcctaatactacgaatctagacatactctgtccagattcactcgtagcactaggatacttacatccaataaaaatcccttatattcatggacgaatggagtatgtatttagagaagaattaacttcgtaaatgaagttatgggttcttttctcccctaaatatttgagcaaaagtactacccacatactccctcccttcagaaaaaataaattgctggctatgtataactagtagatgcccctcgcatcatagcaggacattagaactcctttgataaaaaaaaacattgatatgatagttgatatctcatagccacttcgatccaatggctgaacaatttatgacagggctaaatttgagagctcccatataacaaattaatgtatttagtgagtcgtgactatttcatagaaataggggataagctattcgattcataaaaataaaataccagtacaggagtgaggctaacttttaaaggggtgtattacagattagtatgttaagagggattaaggtaattaactagatgttttttcaccaaaaaaattgaaataaaaatggaataaagtagtgagacaaaaaggagaggcggaaagcatgcgcctatccaagacagaactggagtgcacccttttataatccccacagttcaacgtgcaacaaaggtaacagtatgcacctaagcaccgcacaagatcacatccaaagtgcacttaatttcatagcatatatagcataaaaattattgcctcacttgtacattgtttttcttgttgacgttttatatcgccttttgccatattagaacccatacagatcttcttttttgtaattttgaggtttttagccttacctctgtacaacattgctttacataattaatattcatacatatcggactttattcatacatttaggcacatcaaaatccatggttgagagtctggccggggaaaaaaataaagcttaaaatataaaaaagtacatactccttttgttcgaaagaaaattataattctacgttgtttagcggaggttaagctcgggtaaaaatgacttggatgctctttaataaatgaggtagtgttaagggtgcttttgggcagttcatttgggaatgaatttaactgtaaagtgattgatggagaataattagtattatgaacggtggtaggactgtttatatcatcctggaattaataacggaaatagaggtaaataaatataactatatgttaataaatttggccctcttcacgccagttttacaggttaccaagcccggtttagttcccaaatttttttcacaaaaataccacttcaaatctttggacacatgcattaaatattgataaaaataaaaactaattgcacagttaagaaggagatcgtgagacgaatcattcgagcctaattagttcatgattagccataagtgctacaataacacacacgtactaatgactgattaattatcctcaaaagattcgtctcgcggtttccagacgagttatgaaaatagttttttcattcgtgtctgaaaaccccttctaacatccggtcaaacattcgatgtaacatctaaaaaattttcttttcgcgaactaaacagggcccaagtactactataatgacccaaaaaaaaatctcacatacaccgccactgatgtcacttgtgagcaaaagaagctaagaggctcatcggttgcccacatttcctaataaatcaaaagcaacttaaaagctaacgctaaaaagaaatttatattgaaaatatcttaaaattaatttaaaaatttaaaatttaacttttactttaacttattataggtctaccgatgggggctttaaaaaaaattcctaagaactcac

SEQ ID NO: 50623 - DNA, 1190 bp, Oryza sativa
acaatcaaaagtccctaacagtgcacaaccttccttgctcatattcatgcttttgctgaaatggacattgatggcaaggtaaaataagacaacaaagacgcatgaataggttttgtgtgattaacagctgcattctgatataaccataccgttaaattactggccagggattgttaccattaattattatttggtattcctatgtttcacattctttctttaacaatggacaaccttccttgctcatatccatgcttttgctgaaatggatattgatgcttcaaccagaagagcagaccttggatgaagatagctagggctatgatgggggaagcggacctctggcggatggctagatcccttcgcttgttctttggtcaccaaatcattcgggagattaggcttctacttttctcttcccctctcctgtaccctgtccctttttttttatttttcaggcccgttctgtaaatacatttattcctcttcataaaaaatgcgcatctcgtgtattcccaaaatggccaaggtaaaaaaagacaacaaagacacatgaataggttttatgtgattaacagctgcattaagatataaccataccgttaaattactggctagggattgttacaattaattattatttggtattcctatgtttcacattctttcttttagagaaaccatctctattttacgttacaagacattctgagttttaaatagttaatacgtgtatgcattatgtgctaagagacggagaaaaacccgaaaaatgaaaagattaaagcggcagatcgagtctcgccgcttctcgatttctcacgcatacgtatgagccacgtccttgtggctcaggcaccagcagcccagtagtcgatggcccaaggcccaagccagctgcaccagccaaagctctcagctcccaggcacatgcatgtaacttgtttgtccattacgttgcaccaatgtatttcttccacaataaaaaataatggttagttttgatccatatatttttaaaaaataacatatttttcatgtcgaaactatatcattgaatttgtgtttcttttcttttttttttacaatccctagacatgtatttggaaatacctattaatttgtagtaaaggaattagtaaaaaaagggcctttttttttttaataaaatagactaaaaataattttaa

SEQ ID NO: 50624 - DNA, 697 bp, Oryza sativa
aaaaagaaatatgaataaagaattttcatttgcaggtagaaacttttccaaaagccaacatgccttgggaaaatggtaaaaattctaccaatccttgtcgacataaagtttcaaactcacaatacctcccttgtgacttcacattatttttcatgacaaacgaatgaaagaacaaacagggaaagcaagcagaccagcacccagcagcaatgttggtaattgccgcacaaatctccacgcatgaccgtgaggaactcgtaacgccctgagatttttttagtattttttaaaactttttaattttttagttttaaaataaactctccaaaaactttttttaaaaatatgatccttttgatcacgccagcccatctgatgtagcaaaccaatattgtcatgtcttgtatgtcatgccaaacaacaacgttgtcacgctaactagaccagcatggccaatgttaccatgctagccagattgtcgtggcaacactgtttcgttacgtaagtctgattgacgtggtcaaaagattaatatttggaaataggttttattagagtttatttttaaataaaaaatttaaaaggtttaaaaataaaaatatcccctccttttattttacgaagccatttggcgtgctttattaatctgcaaacataattacatcattcactagaaccttaagcaagaaaattgggg

SEQ ID NO: 50625 - DNA, 683 bp, Oryza sativa
tttttttcatcggttatttaagtatttttttatgccttgggactggtgagctgtgactttaatttcttagtccagaatgctctaaattttttttgctatttgattgtgaagtgcgaagccaatgacgctagttaattagccgttgtccgatggaaatactctcaagttttgtccaattaatgtcccaacaatggaaaaaagttcatttaacagtacgtttctcacctacgtgcagtaaaaggtacagcatggagaaacattgggttttgctgcagtagtgctagtattttgttcaggaaaaaaaagtcattaatttgttgtctttgcacaccatgaagaatgtttaattggatattacatggtgaaatttaccaaaatgattttaaaaagctgatatagttgtaccattaattaaggttgctaacatctgttgctattaggagaatgcaaaacagggaagaaatcgaaatggatcaaaatttaatgaagtgccatactcactacttagggcatgaacatggtatgtcgttccaaaagatgccatgtaggatttttaatgatgtggaggaaaaagaaagaggataaagagaatattgttgtttgttaattaacataaagtctaatagacaacttaatatttaatgtgattaccgtttataccactctagaagttgtctgtctgt

SEQ ID NO: 50626 - DNA, 929 bp, Oryza sativa
agatttgttgccagctgcagcacgaattccaagatacatgtgtgtatgataggtgtgaccaaatattaattatgtagtatatgtttatagctaactattgtatgaattagctattaaattggttatagatgatttgaagctggcagttgcctatactattaaacttgctcttatgggctgagttaacacaaaagccaacagcttttactcaggtgcatccgcgaatcacacgatgccttaattcttttccttagagtaaggataataatagagcccacttcctactattagcccatcttaaagtcaacatatataatagattagctataaggttggctacaattttcttctcatctctctatctctcacttatacatttaatacatttgtcttggagcttgtgataagctagctcttgcatgagagccaacatccttaatttttcactacctctcttctccacctaagcttatagtaggcttatagctcactattatacttgctcttagttccagccatgatacgatcgagctcaaagtgaacttcttccctaatccctagtggtccttattgtgcacgactgcttcccggttgagaacattcaatatcaacaagaaaactaaccgagcttttgaaaaactatttttacggactgtaggtaactgatattttaatacggtgtgtaatttttttacgcattcgtgaaaaaaaagatattttaatacggtgagctttcaaaattaactgagctcacagtaataaagaaattatatattgtatgttccacgggatggtgtgaagttcatagatatttttttattacataaaagatgcacatgactatggtactacacatgtaatagcaagtgcgtacttcctaatgcgcaatgtttaatgagatgaaagctagcggaaaatatatcttggcc

SEQ ID NO: 50627 - DNA, 538 bp, Oryza sativa
gtctatgccttacgttgcgttttttttttgcctttgttttgtttatctattcgttacgttatttaatcctcgggatgttatctccgaagaacttggatgttatctccgaagaacttgtgacgaattttatcttcagcctgacaagtcgaccaattgcgtaatataaaaataacttttttggttaatactactttcttttttggaacaaccaccatatccataccattaagtatagaaagcacaaggatcaaacccgaaaccagaagcaacgctacttcctccattcctctattggtaattcaacaaggtctgttcgagtaagatgcagtatccgacaaaaatgcaagttaaatttggtaatgaaacttgtgatgtctgaacaaatcaccggcatcaaaacttggatcaggaaacaccgtgaccactaggcatttagcaggaagacgtgccctattgtcatagtctcatagtcatcacattaggatgcaggatattgcagtaagttacaggcttacacccttacatgtgcctacaatca

SEQ ID NO: 50628 - DNA, 2354 bp, Oryza sativa
tggtcctcttccaggctgatctgcgaaggccgggtttcttgttcttcattggtgtcttgggtacagtctatcgcataatgtccgaattgaccacaagaaaaacaacagccatctctccttggttgccatgggaaactccttctcggtccaactctcaaccttctttgggggcatttattggcataatgtcctttctcaccacaaccaaaacatgtgacatttgccttccgtcttgccgtagtcagatggcagcttccatttgcagggtattgctttaagtgatttagaccgatgctgtagtcttcaggctttagtgaggattggactcgttctttgtcactagaagcttggggaggttcttcaaagagcattatgggttgttttatccccatattttgcaggccttgtaagttggaaggattcttgtgtcttggtgttggttgatccatgtcttcttgtcttgtggtaggtttattctgttagaagttagtaggttgaaggttagtaaactaaaattctcggggcccaatagtagcatgacaatgctgaattgttgtctttcttcttcatctgttcactccatttcttaatattatgctataaatcgtgttggtgagagccgtggttgtatcttgtgcagtattactgtccaatggtaccgaatctgctcaatttccttgtccaagggtgaataaaccttgatatatagtattccttatccatattgttctcacaaattattgattctcttgaggtcttcccataataggctaccccccttaaaataagaatgtttgaaaataatttaaaaaggtaacaacataaaaaaaaggttttgtacaagtatcctttgaaattgatgtatgcaaaccatttaaagttttcaagagaggtattttctcacccaatataatttgataacagatttttcaaggaagattttgtataatcatacatttagcaaaatcaatacggcaactagaaacttctgcaaccaaagcaacctttgattttattttgcaaaagaaaactcttgccaacagggcaaaatgccatatagtttgcatgcacggttcatagttgaaacaacaatacttttgaatatcccaaaataaatctcctgaaagtaattttttttggacctttttcagaaattgcaatattttcaaatggaaacaatcgcttggaaaacagttttcacaaaggttttggaaatctttcacaataatttcctttgcaaggaaagctttaggcaatagttctagaagttcagctttgcaaaccttttggaaaggatgtttacgaacacatgcgttcaaaatttgattttgcacggaattttaatttttggaaaattttgcaataaactatttagaactgaaattcacatatattttacaaagagatatttattttgaaactaattttgaccattaccagaatttaaatataatctcaaagtggttttggagacaattttgcaattacattgttggaaacaaacactcttttctctttggagaaattatctttgcaaaactttatttaaaaatgcaaaaattaattctgttttgcaaatattttttaaagacaatccccaaaacaaagttctcgggggaattaagccatatcagtttgacttgtccttggaattttgaagcaacccggagctgaaatccaacaaatccatattccttttatccttcgtccatgtatccttatccaaaatggcgttccttttattaaatttccaaattcgcatactatcttaagtgtgatacagatccatacctttgaatccttctctgtttatggaaataactagcaatcttgcatggttttctcatagatatgcagtctgtttgtcttctttttattgctctttgtgatattcccatgccgaaggtagtacatttgtggttactaacggcttagtcgatgcttcactcctactgtacgagagtgtaactagaggaaaccagttctaaaaatggtaagttctcatgatcgataagttagtttctgatcttttctcttttctttactttgtttttgtacaatatgatgcaatcgtctagtttcgaggatgaggtttcgacagcaatcaataatattcctatggcgtcttaatttcttacggtcttatcctacaattttgaagtacatgtaagaatatagaaccaatatttttcaatcacaaatgaagtagtaagatagccttttcaaagaaagggttgagatgtatggtatcaaaataattttttttcggcgcatcggaattaaacatttttgaagaggtaagatgggaaaacaacatttgaatgttttcacatttttttttcttttcagcactt

SEQ ID NO: 50629 - DNA, 587 bp, Oryza sativa
gttaacatagttattaaattcgattatagaaatccatttcttcaagttatataaaaataataaattaaattttaattaatatacgcaaatgaacattgaatgccattctcgcattgaagttcatcaatctttttacaacgtgaataaaaaagcctaagaaaaacaaaggagaaatggccttcggttcctcgcctcattgtttcagcctcacgagcttgataaagatgcagaagtcatgcgcgaacgcggtcaccgcgatggtctccgtgaacctggtcaggtgttcgaccatcacctggacaagcggcgacacggcggcgagcggcggcatcaccaccaccgcgacgccgccgacgaccatgccgaggaagagcgccgcgcagttgagccacagcgccctcccctccaccctgacgtcggggcagtactgctcgccgccggcgccgcactgcagcgacaccagcagcatcagcccggcgacggccaccgacaccgcgcacttggcggcgcgcgccggctcggcggagttgtcggcgaggaggtcccgcgccatcggcggcagcgcgaaggggacgtacctggacagg

SEQ ID NO: 50630 - DNA, 3483 bp, Oryza sativa
cataatagcgcggaatccaaaatttaacatgggttggcccacattgactcctaggccatctgctcacaggccacacggtctcatccacacagggaaatgcacgaatcatggcgcaaatcctacggatagaaaaacgacaaatattgggggtgaaaatctgttgacaaagatctagcaaaatcgtttgcgttttgattgacgaagatggattagttacgggcctgctgctgcggaggctgaaattttattcggccctggactaatacctatcagcccaagtaaattacctggaaattgggcctacataatactggaagtgggcccttggtgtttgtgctctaggagctgcaggcccatatataatttctcaatccttttaggcaattaatttcctccatttgtagcacataactacatgagaagatatgtcacgtgaactctatatttagcataaacctgaaaactaccctgaaaaaaagtaaacgtttaagttttatttatctaggatttaaaagttttactcatagtgacgtgaatacattttagacgttcatttctgtcttctaatataagggattttgacattctgcttgtactgcttgaccacacgttttatttaaaaaaattgtgcaaatataaaaaacaaaaaaaatatgcttaaagtactttggataataaagtaagtcacaaataaaataaataataatttcaaaattttttaataagacgagtggtcaaacgttgcaagcaaaaactcaaaatcccttatattatgggacggagggagtaggaatcagggttggggaagagggaagaggggactccctcgggtttagaggaagatcgaggcagctatggctcgacgataagctgatacagatagaagtgaggcatttccaaagccaaagtgatggaggaggatgatgagcgacgatagcgggggccgtggatccagtaataggaattacaggggacggagagatcggtattaagaggaacatcgttgaagatggggaagaaggcacagagtggttaggctgcaatgacggattcagcatagtgagttgtgggagaaggagaaattgctgggagtggtcaaccgcatgcaaagatcagttttggccgcttggaaaaaccattttttaagtagtgaccggcacataggaggagtcagacaatgagattggtgtgatgcgactgacgactgtaatagttatctctttttatatatgtctataggagttggtttgaaccattgaatcttgaccgaaggatgaaataaaaaaaagaccgaataggagatctctcaattggcaaccatcgccggtcatccggttgctacataacatccgtgaattttatggccgaacatttgtagtagctattgatggacaaaatccacaattccctgttctccatttctattgttctttattagaatttagaaggtactaagcaggtgatgatgggcctactttcgaaggcattccattttgcgctttatatgctgaagacacacgatacaatgaaaaatgatcttaaagtatgatggtccaaaatccatattgtggcaaaaacaatataaaaataagtaaattaatttgaaaagttaagaattaatatggccacggcttataattaagacataactcaaagatatattgtatacttcctctagtcattaatatttgatgtcgatcgggtaacacctattccctccgtccaaaaaaactcaacttctagagtttgaattttgttccaaaaaaaccaacttttacccttctacctactctcagcacgtaaaacgagaaattttattgcttcaatactctttacctacatatcactcttactatttttttaatgattaagggtattttagtcattttcactctccactagtttcacctagggatgctaggaatggactgtttctgggagggaggaagtaactagtaggaataaaatccggttgacatcaaattaaataatcaaatattagtgaccggagatagtacgacgctgaggtaacggtaactctcatgcaagattgtaaaaagaaccgtatatctatcttcttttggaacctcacctgactgaaaagctactccttccgcgctttgcaaatgcatgcagccgtcactatatatgactacacacatatatatatacaccacacacataacctttaatttattaacttctcaaaaaactctcgacgttcggtggatttttttttctgacaaaaacaaaagagcacttatcgtacccatcagcacactgtccatacccacccttttctttctatccaaacgtgagaaaaagtgcattatttgatacgtacatctcatggtatgtatggtgttccatccatcaaactttggctgcagtacacactttggtcggccatccctccgatctctcaagtgcgcccaaaaagtagatttcctcgtaaaaagagaaggggaaagatggctagcatcgatccatccttgttttgttttctttgtttctacctgcaggagctaggtcaatgctccagtgctgcacatatccaatcaacttagtttttttattaaaaaaaaacaaatcaacttagcttaaggccggctcctttccaattgaccacacgaaatttataggaatcaatttaatttctgtacaaattctctaaaagtcctttgttccaaagtaggcctacactagtacataaataatttctccagacggccaaaacaaattttcacaaacaggcctctggcccatctacacctaggtttctgtgaattaaaatcgctaaatttccatgcggttagtgcaaccgcatgcgtaaacgtgattttcgcatgcggtcacatttaccgaccgcacacgaaaatagtttcagttaaaagaaatccagaaaatcaaaatcacccgaaaccctagccgctaccgccgtcgtcgtcagagcagctgccactgccatcgtcgtcagagcagccgtcaacactagtcgtcatcgttgcgctgccactacccaccgcaatcgctcccgagagctaggggcggaggcatagtatattagaggagtgtctaggaaaccggccaagaaaaaaatttagctatacctcacctatttttatcatgtgtgcacccccctcaatacaaacatagacacccgaatcagcttaaactcgatctaaaatagagtaaattaagcgttaaaaccgaatcagctatacctccgtttcgttctagctccgcccctggctagagcggggacggcggatccacgcgccaccatcgcttcctagggtggggacagtggatccatccattcccatcgcttgtcgcccgtcgctcctgaggatggggacgacggatccgtgcgccaccgccactcacgcgggcggggacggtggatccgctcgctcccaccactgacgccggccgttcactccttctatcgccgccactcccgagggggtgggggggggggtg

SEQ ID NO: 50631 - DNA, 2447 bp, Oryza sativa
ggtgtggtgtagagaaagaaggggagttcaaaaaatgttgtggtaaaaagtgtgagggtccatgtgctctgtaagtagcccgcatacgaaaatctactttcgcatgctgttttcgcatgtaaaaatagactcatttttgcatgcggatgtgttaagaggttcgcgtgcgaatttttgcatgtgagcctcttaaggagctgtatgcgaaaatactggtcgatttttgctggtgtgaccagttattatccgtctacaaactataggggtcctcgtatagaaaaatcatttctgtagtagtgttagaagaagatgcatgcaactgctctatgcttttgtgctggacctgtcccttactactaaaaaacaattttcccaaacggctaaaatgcattttcacatgctggtatagcaatcgtatagccccaggtgtatgtaaaaatagggatttttctaggcaggcaacacaattgcacgcaaaaaaatggattttcgcatgcggcatgttatgctgcctgacttcaaaaagaattcttgcacaataaaaaaaaatcaaaaacagaaaaatcgtaaaagcccaagctcgagagcggccgtctgctgtcgctggacccaccgtcactgacctcccaaccgtcggattcacacctgccgaggcccatcgccgcattcgttgtcgcagctcccaccagatcggcgcgcgatggtgggggatatgacactggatctgttgcgttgagccccaccgccgcagcgggcaccgagcggtcaagccctaccactaccaacccttgtgagggagtgagggaggagcactgggagaggatgtggttgagacttatccactctatggttagtagaggaggatacatatccagactagcttgctggataagtttttcacggctagtgctctttagcagtcgtctgcgaaaattgatttccgtaagtagtcgcttaagacattcgtatgtgaaaatagttttattttcacatgtagacgtgttaagcgaccacttacgaaaatcgatttttgcagacgaacatataccacaagagctttctcactattattacaaaaggatttttattgccccatctgaaaaaaaataaaacactggtgtctgcaaaaattgttttatagtagtgccaacaagagtatattttggttgtttttaccctagacgattcacatgcatatatatagatccatgagcgtcacttttaacatgcatttagacgatatatggagattattgataaatatatgatctcactaaaattttgcatgctaaaataaagtgtatgcgagtatgtgtatacgtatgttatgcatatcaggattcatcttaggcccccttcaaacaaatgatttgtgatgtggcggagccatctcctggataggtcgagcagttgccagggctccgtcgccgtctcctatctatagttgtcaacccctataaaaattagtcaatcattgaaaaacgctattagtgtcgttcgggcttgatgatgtcgttggctccgccattggatttgtggaataattttgtaggattcaaataatccaatagaaaattttcctatattgtcctttaaaacaaaggattggagcttcccatatcctatgaaattactaagaaatagcttattttggaaaaaaaatttaacaggagctctagcacctcttgcaaattttcctgagttcatctcttattcaattcatgcgttttttctatagtttaatcaaatgatcattccattgctgtattctccgtgttttgtaattctcttttttggatttgcattgccaacaaagtcatgtattttttttctattcatctgttttcttaatcgtgagttttaaagtggccgttaaagttggagcaatatcgtgtcgacgaattattactagcttagcttgggaagcgtttaggtcggcccgtatatgtgcagtgtatgcttgcacataaggggatacgtacgtcgataaatagtggtagaaacttgactggagctcgcatacaacaaaacgggtgaaagtttttcaacatgcagaactgacattaatgatgtaccgcatgcatgcatgccaatggtggcggcaatcgatcgtcatcctccgaattaccaataaatgtcaacactgtatatatgcagcgctagatcgattgtcgttatacatgtacagttgcgaacacagacacaattgataatcgatcggtagtcctaactggagtaattaacaagggctggagctagatttaatttacgtactgcttcatgacctgaaactgaagaaaacattggttgatcttgttccaccatgggttaacatagcagaacggcatgattacatcaaaatcatcaccaacacgtaattaataagttgatcatcatacatatgatcgatcggtgctatataatcatggtaatataccaccagccag

SEQ ID NO: 50632 - DNA, 2771 bp, Oryza sativa
aatccacatattttaaaggttaaatcatcctatagttatcctagtaaaacttctaaaatatacgttgtttggcaaataaaattagtgctaaatttgccgctttgttatattatggctaaatatgtagttctatgctaactccgttataaattatgggagtgtctagattttaagcacatggaaaattttcaaaaactttaatcacaattctcacctcttagatataatccactggttgttatcaatacctacttatgcaaacaaaatctgtttctactaaaagattgacaaaattacataaaccaccccataacctattttgtcgcaaaagcccacccatcaaatattgtgaggccaaaattacccaaatgcttaagtcggactcaccacaaaccacactacctagcttggcttagttgatatggtccgccgggattcaagtaaaaaatggaccgaatcagttactcatgtgtcagggagagggcgagggtagagtggtttttccaacacaatgggttatgcgatggaatctcaaaacagggtgacaattataatgatttatgcaatttctcctaaaagattaaacaataaactattctaacctataaaaagaattacaaaactgcatgagataaacttataactaataaaaacttactaaattacatgaaaaaaaatgtttgaacttagataaaaataaaactctaccaaataccttacatgacagtttcatagtattgtagcctaaggctgctttcatttgaagcaccgtgagaaaaaatagtgcatcgtttttcgcgtgcgcagatattgaacggttaaaaggtatttttttaaaaaaatatataggaaagtggatttaaatatggtattatccatttttcacttttgaaataattaatactcaattaattatactctaatgactcatattgttttacgtattttcttaatcttctacttttcccttcctttagtgtttttagaaggagtaattctacggttcttgagaaggtaccaagatgtaccaaaaatttagtgcaaaatttaccaaatttacaattgaaaaagtggtacctcatggtacattctcaaggaccgtaaaattgctctttagaagtagctaggcttattccttttcatggttttgaacggttgattttgtgcttaaaatttcctctctcttaaaaagaagagtaaaattcacaaaactacatgttttattgtccaacttgtataacaatgtacatattttaacacttatcacttaactacatatattttagtattgaagtttcacaaaactatactatcaacgaacgaatccacctgcaagacgacgtgattgtttatctacatatatttacaatgcggacgtggcatcgtgaatgttcgacctcggatgaagcactcaagttcgcatcctaggtgaaacaaccgcacatcatctcgcgggtggatccattctctaatagtgtagttttatgaaactttaatatcaaaatatatgtagttaagtgttaagtgttaaaatatatgtaattttctacaacttgaacaactgaaaatgtagtcatgtgaaatttacttagaaaaggttctgcatgaaaaaaaaagaggttctacacgatttttgtgtggttaacgtgcgattaccgcggtaatcgtcctacggcaggggtgcagtaaccccggtcaaaacgaatgggaaaccctgcccttaagaacccggggtcttcagtacaacccagcaccggcgattgaacaggtccagaatccagaatggtgcgattgattgctcccggtgcgtgggacgcgccaacacacaaactggaaaaaaacccaaacagtggctacgagcgagcgtctccaaaacgaaccaagtactagcgactaaacgaaactttttgctcccgcgactcccgactcggctctcccgggcaccgcgggacggaaacttagccgcgttccgacgaccccagtgaaccagaacgaccggttccagctgctacacgcgagcaacaagttgaagcagagagtacggttcagagtgcccgaatgtccgattacactgtggacctggtcacctggacttcatcttggccggggccgctgaccaagatgggcgacccacccaccggtggcgcggctggagcaactggcgaggatcacaagattcagggcccgtctagttccccaaaaatttttcccaaaaatatcacatcaaatctttagatatatgcatgaagtattaaatatagataaaaagaaaaactaattgcacagttatgggggaaatcgcgagacgaaccttttaagcctaattagtctatgattagctataagtgtaacccacatgtgctaatgacggcttaattagtatcaaaagattcgtcaaacggtttccaggcgagttctgaaattagttttttcatccgtatccgaaaaccccttccgacatccggtcaaacgttcgatgtgacacccaaaaatttctttttccccaactaaacacacgcacaatggatctcctgagaaattaacacactgacagataacatggcaaaatctgcaagacaatttcccagccatgctcagttgttctaatatttccccatgtatatcaaaagtttggctgtcctgttaaaaaaggacttgttattattcccgagggagatgtaatcatagctcatcatgcattgtgtttcttgactttttattctataaataaattttcatgagtctaatggtgtgtttggttaggtaaatgg

SEQ ID NO: 50633 - DNA, 671 bp, Oryza sativa
ggccaattgccccaaatggcgcagagtccacccttgaccctcacccccaattcccccaaagatcccaattcggggttaagttaaggtaccagcaggccccagacccagatccaaccgccacagcgcgctaaaacggcaaagccccattcccgaatcggagcatgcgcgggcagagcgctcggaaatgcagcgacaagagcagcagaattcagtaaatttacagagattactctagagagagaaagtcagagagacggtacttttgctgtcggcggccgaggcggcggagaggaggagcgccgccagcacggcggccagcagcggccgcgcggggatcgtcgtcgtcgccgccattgtcgccgcgtgccggatccgatgaagctgggtgggcgtgcgtgtcggcgagaggagaggaaggatttggagcttgggtgaggtgagctcagagctctcagcttgtgatctctcccggtcgatctgctgcgagctcgctttctttaaagcctttttctctctctctctcgtgctcgctagtgagtgtgtgcggcttccgttccgtgtgacggtgtgaggcgtcgttgccgttggcgtggatgagtgtatttccaataatacccccgccgactattttcagttagaaggcagccttcaatttcctcaagcagaaagaa

SEQ ID NO: 50634 - DNA, 2327 bp, Oryza sativa
ttttgatgggttatcataaatatacggtgtcttttaatgggttgtctgtgatatattgttttgtatcgtgtttatccagaattttccaagaagttaaaaaaatagcatttccattccattttcaaataattcagaatctaaataaagcagtcgatacaaaactgcaatgtagcagataccattagaaaacttcaagccatttcaccgctaccagaaagtcaataaaactaagtgtatcattagtcttttaagatatttcattgaattgaataacttaaattaccttgccctggttccctcaatcgtcggtgcgatctcacttgtaatgatctgcggtttgtatttaatttgattaattaagtgcactttatgatgtgacgtaccgacgtgtcttcaccgaacgttcaatgacgctactagctttatatatgtacgttcttattaaaaaaaaaagagagatgatggtatcacacagctagtcgcataatatggtaagtgagattttcatgaggcatttttactcttcgtttacacattcaagaggggttatgaatttacagactttattacccatgttatctgcatggagccgtaacccgtaagtacttgtgcagattaaaattaaataagcgaaaggaagtattcttttctggggtaagtttgcatcaactagtcaaatctgttattctccacctgtagtagcaatttgatgccttttgtaatctatttgccgttacctatgaggctgtgaaattaagcacactgaaatttaaaaaaggaccaaatggtaggtgcatgccatgtgcaggttcttaaattaagaacgcaaacactgcaaaatcaaacgacgcctatatctgccgtgattttgcaataacaagcttagcacatctgcacatcacatggcagcaataatgtgttctttttgtcatgtctacggttttacggactgctatatccgaacatacgcgggcctccgacgaggatttaatttgtccgtgatgattgacaaattgataacctaaccaatgtcaccgacgacagtggtaataaactaggagtactacctgacccgtgcatgctaatggagtattatcagtttgtcagtacagtatgagggggcagcgctagtgagacaattaaatgaccaacgaacggacgctgtcatgtcacctctcttaatcttcttcaaaatggaagaatttatagagattttgtcagaatttaattaaattatgtgaaatttctgtaaagttcttacattaaaaaagaaccatggaaaaacaatctattttgccacttattaggcgtttaactatttacgacccatatttaccacccaaggatgacacacacaaaaaatatattgtcataacacatgtgtgcttatttacctacgacatatgagtccaatatcaaatagttaatagccacatttaaaaatggtaaatagttaaatatctccacaccagcactaaaaattaaatcgttaaatgtcacatctaaaagtgataaatagttaaatatctcccggatctgaactgttgatgattaatctgaaccgcctgcccaaaaggcacagaggttcggtagaggtccaaggtgtattcggaatagcatgttcccaacatgcactgtaaacacgaaaaacgaagcggtccattagtgtgtgattaataaagtattagctaatttttttaaaaaaaatggatcaatatgatttttttaaacaactttcgtataaaattttttttgcaaaataacgtaccgtttaacagtctaaaaagtgtgcgtatggaatacgatggagaggtgttccaatcacagccaatatattttgaagagtgacaattataaagggcacatcaggaaatttacctaccgcactgttcgtgccagatgtgatcttagccgcttatacctaatcgaacggtgagcctatcctcctctcccacctccccaaaacctcgacaaatcgtggctccggccgccggcggccgtacccgcctcctcgagaggaaacacccccgacccacatccttcgctgcacagagcatgcagcatctgacgcgccatcccaaccatggccgcaggcgaccagggccatgtccatctccggcggttcaattcttcgagtactaaccatctccttcgggcacggcgactaagggcctgtttggttgctaccctgagcaaataagcctggcctaaggtcatgcctgtaactcgcctggcctctggttgggtgcttaccctgaggattctagcctgataaatcttgcctgagtgtactcgcctgaatcaggcgtacaaaatgggtggcctga

SEQ ID NO: 50635 - DNA, 1127 bp, Oryza sativa
agttgagttatagtaattcataggataaaatcaaactctatacaatagtgaactcccgattcgtgttatgtgctgctttcagttctgaatcttatgctgactcaattgtagattctaataggatattggtgttgaatttacgtgattctgaattaacattggccagtagctttctgtaaccaacagagtaaaaaggtcaaaaggtattggatgtctgctggagttcaatcagttcgggttaatggatcatgtgccaacagtgcatgtcaaaccaatatcgcacaaatgatacagatatgaatacagatggggtaaatgcgaactttaatacttacatattatcttggcacactcttcgggagaatcaacgcgacatggcacctaaattaagcagacaggagccagttagtacaaacatcctaacactgcagtacagtgagacaaaagatactgtaccaagggctcatggcaaaatatataaaggaaagattctgggaccttcagatcaacacaatacacaacattgaaaaatcaacacccatactcatttccagctcttcttttttatacagattcacaccagattacagaaaagaaaatctccttaaacaaacaaaacaaaaattaaatatagcttataaacattttacataagcaaattattctaccttacatccgctgacttctgtaaagaaagcaggaaattcattggttttgtaagcagcaaccgttactccttgagtttcctgccaatgcaatcagttaacctatacgattgagcaccaaacaacattgcattcattgaaatgcctagccagaaatacaccaaatttcaaatatagcacatttaacgagtaaaacctaaagaaataacttgtctataccaagaaacaccagaaaattgtcatgacttacttgaaaaggatggtcgtagattatggagaataaaatgaacaaacgtatgattctggaaaactataaaccctcagttgtagatctagcagttttacttgtctggatggagttatcatggacatgagaaaactttcaggttctgaggcaacagcattctattggttaagggaaatataccaccaaaaaatccataggaagtgagctaattttcg

SEQ ID NO: 50636 - DNA, 691 bp, Oryza sativa
ttctttatccccgacgacggcatgcgtaccatacgctgccactgcatgcgtgcatgtgccggaatcatagcatgcgcggctcggctgcaaagagggacgccttcttatcatcaccagtcatgggctcgtggcaggccataccagggtttctcataccgccggagccagggttatcgcgctccgatggtaagcactgtggcaaaccatacaaaaccgtgtaaaatttatcaatattttaaattattttttaaatttaagaagattaccatggtttttcttttaccgtaccccgcggtaagcacggtaaccgtgcagttaccggcggtattgcaaaccctgggccacacacgatggactccactagatgctgcagtccttttttttttttttgttagtgattgaattagagcaagtttaatagtatggctaactatcggtttctaaattacctatcgtcaattcctctgatgaaactgcaaatatgcaatagctataccatccgcactggcacgatggttgcttgactgcacagactttcaaaaggaatcgactatgcaactgatggctacaattatttatgagccatggaagacaagaaatagtgcaaggtttgaaaacatttttgactgatcggattccgtggcgcaaagagttctttttcttctggatgaattgccgaagttgaaagatc

SEQ ID NO: 50637 - DNA, 638 bp, Oryza sativa
ttccctttcgggaaacccgaaggtaggtacaagcaagctgttcttaccttacacagcgttataacacacctccttgcttcaatatactatgcaaggtaggctaaagtcactactactaagaacggtggaatggagggtgagagcgcgcttggaagctttgctctgaatggtgtcttcgttgttcttctcagctgagcaaacccctccttttataggagctctgaaggctcgactgtgcttcaagcttatcttttagatactgtattttcacgagctggctcgcaccatggagatgcttatcttctttttggctttactttgtccttgaattggccaaggtggagacacctctgtacctgcgcctttcttttccgccgaaagcaatattctccacagtatttttaacagtcaaatgttattcactgtccttgcattttggattgattcaaattcaattcatactttggtcattcgcaaatatagtcttcccacgcccaaagaatggatatttattatcaatttatattatattgctttattggtcaggctgcccatgaccacctaaatccatagtatctacatcagaaaaggagacttcaaatttttcatcatatgcttttttcatttcttcaaattta

SEQ ID NO: 50638 - DNA, 1536 bp, Oryza sativa
catatatatatatatatatatatatatatatatatatagcagtcagcagcatattcgtatttcttttggcgttacgcactagcagatacacatactgcgtgcatccaaacatctgtagcacggcacacacttgaaagtatatagaataacaatcacatgccacaaagttttttcatgtattacagtacagcttatggttcaccaatacagccggaatgcatgcatgaacaagcagcatccacttggtccatcagatgcacacatataaatgtactagcaatcaagcactccccatgctcaatcacaattcacacaccacacgagcagacaggcgcagccgcagacaggcgcagccgctgcttattcttattagctattctgatccgctgcaaacaggcaggggtagctgatagacacacactcgctcatcatgagctcagaccacaccaatcacacagacagaggcaggcacaaccacaaccagccgttgcttcaatacgtacgtacagtttcgtactcaagcgaaagccacacacactcatcactcggccgagcacacacggaaaacggagtgggcacacctgaagccccatatcctggctcgcagaacaaactgataaatcaaaacacgaggtagcactgctgtgctagtcggcaatccagtcaccgattagccagcaagacacgcaggcagacacttactgaagataacaagcgagcaagcaactgaagttgtagcagagcagatgcacgtacggttcaggatttcacctgggcatgcagagaggagatgatgagaagcaacggaaatcaagagtgagcaatcagtaagccgctgccttaattatttagtagtagcagatgtataataatcggatgcagtaatcagtagcagatactatatagatactccctccgttttttaatagacgacgccgttgattttttatcacatgtttgaccattcgtcttatttaaaaacattttataaatatataagatataaatcacacttaaaatactatgagtgataaaccaactcataacaaaataaattataattacgtaattttttttgaataagacgaatggtcaagcatataaaaaaagtcaacggtgtcatctattaaaaaacgggagaatagctaatatagtccctcaagtttcatctaaggctcaatttagtccttcacgtttcattttgtccacatagctcctctaaatatttgttttggcttgaaatcatccttggacccacttaatatgccatatggctatttctagtcaatatttctgttaaaaaatatccattttgcccttaatttgcatataactataactagaaaagagaaaaccaagatgaataaaaaaaattgcagatgtacttcctattatttcaacatgtgcacatgaaacttaagaaattgctatcgtatacactttgctagtacataatttattttcattttatatagtttactatgcattatctataaaaaaattcaagcatgcaatttttctcttatatatgtaaat

SEQ ID NO: 50639 - DNA, 3374 bp, Oryza sativa
agtatgttataatttcatccgtcaatgtatgtagagatcgatcgatgtagctatgcatgcatatgtaggttcgataacatacccgaggagggtgcccctgggcatgcgcttgttcttgtagtagcgcgaatgctggggcggctggtagagggaagggtggtggccggcgtccaccccgtcccactccagcgcgtcccacacatccttctccacctcgatggccggcttctgcttgccctgactgcggggcagacggcggaggctccagcatcctctgatcctgatggtctccagcgcgggcgccaccatctcgacggcctcgcatatctgccgcagtgacggcaagtcgtgtaggtggatggtggtcagttttgggaactcgatacttgtcgactggaactccgtgtccggtacaaagatgtgcctgaggtcgccgcagtggatgatgtggagggtttccaagctggggaaggaggggagcgccattggaagcgcaaaccggaggcttgggcaggagcgcaggtgcaagtgctgtagactttgcaagtaaccatctgaggacttgatgcctctgctccatatgcagtgggccttgaggaggtccgatgcccagatgatctccaggcgaccgtcctcatctgcaccctgaggaaagacgacgtctaggttggaggacctctccacgcggcaccacctgaggtaacaccaattttccgcagccaaggcgtggcggcaggccgagtcatcatgcacatgcagggactcgtgcacgataccattagctgaattaacttgttgctttcatcataggcttgcttcacttcactctccacgctgtggcttccatcaccaatctccatgtggcgatccagctgttgggtcggaggctgcgggaaggcctccattgtggttacggcatcgccgaccttgctaaatacatcaccatagatgcctgctacaccgcagtgtttctgaccactgggttcagtcatcttcttgcttgtttcttctggttgcacaactccgctactggatgccattgaagaggtgatactgatgttgaaataataatagtaattgatcgtagccagtaaggaccgagcgagcctagcatccacaatacaagcatgcacctgtaaccggaagtatttatggtcgacggcaagggatggccgagcacatccaagtaccttccgggcaggacgtgtgtctatacagagcaactccagcaaccttgaccgtccccatcttattgcacgaaggtgctcacagcctagcagaaatagccgcttgagacatgggacatccgtcaccatagttccaaagtcgagcaccttgattgcacagcctgaaaggtcccgctccaccaagttgggcaggccacgcaagaacagattgtccagctgcgtgcagccttctagggatatcacggatgttttcacatccttcatacgaatcataccacgccgaacaggacggcagctctgtagaggtagctcaatagttgatgcccgactgggcgctgcagatccatagccatcaaagctgaatgaccttagcgatgatggaagcctattaggcacaacaacatcctccagcgcgtcacaaccgtcaagaataagaaccttaagttggcctgcattggatatgcttgttggcagatttttcatctctttgttgccagacaaatcaagcaattgcagatccgttttgtctacgaatatgtcgttgatgtcagttgatgatgatgatgtctcagcctcattctgagggttgattatccggagcctctcaaggcatggtaatcttttctttaactgacttgttagctgcgagcacctaactccctctatgtttacctccatcagctggttagtcatgagctccatcttttcctcgtggaaaatctcaacccagtccgtgtagcgtaggtcaatcaccctcaagttttgcagacatgcccactttccttgaagttcaactgtactgttgctcttacagcgatctaatccaatgaattttaacgtttggcaatggaggaaaggaggcgatacaaagttgaaggcacaacaggagagaaccagcacgcagaggctactgcactgttcaaaaaaaccatctggtattccaaggaggccaccactgtacatttgagttgctaagaagattgatgatgcacttgccattttagtttgcatagcctcctctatggtatcatttgagatggcaaaaacccaacggtaaggcctgtttgaatttgaatagacaaacttattgtcgtcttccagtaataggaaaggggccttcggatccatcttcaacatttcaaccacccttttcaactcataagaacgacactcgaaacttacttctggatgcaatgcattactgacctccaatgctctagccccttggatgatcccatcgcacgtccaatagttggacgcatgagctggccaaacaaattcattggtgttttgtttattgtgataatacatgagaaacccatagagacaacaatctgcaactatttccaggtcgatgttctgcagacatgggcagcgacctatggtagcagcctcttcacgaaacagtgcaccgaactctgaacttgagaatttatcagcatcctggtagccatatatgaaaagatctgtgtatctgccttcctttattttcctgtaaatactatgtaaataggaaacatccatcacggtaaggaacattctactccaagtccatattactacgcagtcaaaatagtctgcaataccaaatgtgcttagggggatctcatcatcactcccgttaagaaaaaccatcagaaatctgctctggctcagtatcctgctaatcgctgctgaaacatttagtatggcatccctagagcaaatgtccactccactgaagtcatcctcctcatcctgcttatcaaacgatgccatggtctcattgtcaagttttagctcctctgctatttttctttgcatcacccttttgcttttccaccttgagcaatctatgtatatagtcctgtcgaagcgtaattctgggggataaggtttcatggatggaagaacttctgctatggatctaaggaccccggtcctcccaaaaccataccaaccctgaaaataaatcatcgtcatctttctattgatgttgatgttgctctagataagatttagtatttcttctctggcggcaccaacatctctcgccctgatttcctgaaatgcagtagcatatacattaagtccactagtcgctaacacgtggtgatcttcatctctactattataaaagttgaagatgtttttttgccatgaaccttggtacgtcaaccttttctggttctatttatatttttcatc

SEQ ID NO: 50640 - DNA, 2201 bp, Oryza sativa
ctaaatatgttatttataggttttgttgccttaaaaattaatgccaatgggcccgtgaagaataccactatatatcattgtgagactttatacattaattaagggaaattcaaatggtaaattgcttattggacaatgcaaatattaaaatagcatctcataatttgattggaatttatctaaataaagtaaaaaaaggtatgttgcataactaataagggactttgtgttaaataattaagaaaaaaaaagtgtgagcagtcgatattatggggctaaaaccacacacctcaaccaccttactagtaggcgcattgaaaaaagaaatgcagttactgaatgccatatctctacgtccgtaaataatcaaaacatcaaataaaagtagtgccttaaccatggttaattgtgtacaattctcttattcgtaaaattacgacggattgatacaggattagctatacatttattgtcaaattttaactaaaaattttaacagatgtaaatcgtgatgtaattgttgtgtaacttacatgtaactataatgtaacttgtatataactttcaaaaatccctaggtgacatgctaattccgtgaaaacggatgtaatggtaccaaatccccttgcatgttcgtggattgtgattttttttcctacctctcttgcacgaatttaacaaatcgaacggttcaaaattacattatagctatatgcaagttgtaatgtaaatacactacgattatactatatttagatctgtcaaatttttagaaaaaaatttgtcaaatatatagtaaaattgtttctgtatatatgtagcctttgatggtctactggtgttatggccaccttgggtttttgggtaccggtgttattaacacatagttagatgttttgacgatgtagctggatatattacgattgtagtatatttatatctatcaaacttttagaaagaaaatgtcgacaaatatgtatgtatatgtatgtatgcagtatttgatgttctgctggtgttgtggccaccttgggtttccggtaccgatgttattaacgtatagttagatgttttgacgatgtaacactagatatattatataaggaatagcgaccgttacgtgtgttttacgataataactataaaaccttcacgatacgcactttttttttgcgaggacacgatacgtacttttaatatgggatttcaaatgatcttagtcataataatacggtctatctaatcaacagctagatctttcttatttacgtagaagctctctggaagcgcctaatgcagaacatagtaaaatgaaagcagactaactagtgtgcataaatggaagaaaacagttgtaccggttctttcatgatggaattccaatgccgtacaagatggaacaagaacgggcagagaaggcgcggatgcacaatcgtcggttgatgatcagcctaacccatgacggatcgatcgatccgccaactggtgaaatgccgatcgcctctttgccaactcctgcatgggtacagaattaacactctaactgtcagctctaattaatataatccctctgcgcttcacaaatcacaactgttggtgagagtagttctggagctctggatcagcattgttgcagaagcagaaggggaacaatcacctacctgcagggaagctcgtcgctcggaattagacgagaattcgtcgatccgtcgtccaaagaagagccctagttagctgctaattcgtctccaaatcaaagacacgacatgacacgcgattccttgcttgttgcattgcctggtggtattagaagagttggctggtgggtcatcggatcctttgcttctcaccgagctcgcgtctcttttacaaattaaagcatggaatcgaattctgttgcgtttttattctttctctaaagatgtatcatcgtttcccatgcagttgctgtgatcatgcatgtctgcacggcccattgatttatttaggctgtgtttagttaacgtaaaaattaaaagtttggttgaaattagaacgatgtgatggaaaaattagaagtttgtgtgtgtagaaaagttttgatgtgatgaaaaagttgaaagtttgaagaaaaactttgaaactaaacacggcctaaggctagagaactagtctttgctcctttgtctaaaaagtaaagagattgaattgggtccaattaa

SEQ ID NO: 50641 - DNA, 904 bp, Oryza sativa
tcaatcatgttgtctagaaaacaagcacgatgacacatatgtgtgttagtgatatgccctaaaggcaatcatagagatgattgtatcacatactatgtttacatatttatccgatttgttccttgaaatagataactcatcattggttaatgaatatatgactctttcatgagactctttatgttgtttgttactatttttaaagtatccccgatcaaatatcatatgtggaataaatatatttaagtgatgaacacatgtattaattgatgatcatgtctcatggatcatagtatagagataccaaattaataatgtggacacatgttgttggatagacccaacatgagacactgcaagagccatatgtgttgtgtcatcagtgatctcatttagtgttggtgttgaatccttacatctgagattattatggttcccaatatgtgtagtagcttacttagggacagataaacgctacttcgtaattgggtagttataaaagtagttttcgggtatgctataaaacatgtagtgggatatgaataatcaagatatgatttgctcctcctatggagagatatctctgggcccttcgatattgtaggttatggaagtgcatggccataccaaaggtgattgaggagtcaatcacaagttatataactatcacaggtttgaatgaaatatttagctaataaaggaaggcccaaaaaaagcttttaagttaattcaaattgttaagccaaaggggttaaccagaacttaaaaggtccaccgaatttaaaattaaggaaggcccggggggtcaatacgttctgctaggggccgctgttgactcgtggaacaaaggtagttttcgggttacagcagagtgtacatgaatctacagggtcgcacgtttaat

SEQ ID NO: 50642 - DNA, 1640 bp, Oryza sativa
attcaataaaattaacatcgacttatgctggttcataaaaaaaatggcattgatacgtgaattatgtcatcaatgacctgaacataaccgtccaaaaactactgaaaagtagtattaagggaggtcacctatgcatcatttctgacgtaagatttgacagcattttttattcttcttgttcaagtaattttgcaacaaaaatgcatgtcagccttttgtaatgctacgtaaactggcaacgcaacacgttcgagatactctctccgtctctatgatataaagatatataaaagattttgtaatgctcgattgtttgacaattcgtcttattaaaaaaaattaaaattattatttattttatttgtgacttactttattatctaaaagtattttaagcacaacgttttgttttttatatttgcactatttttttaatatgatgagtagtcaaacattacaataatactagtgaatattctttatattaagagaaataatactagtgaatattctttatattaagggacggagggagtagatgaactactggatgggagtggtcaatggagtccatgattttacttatctttttatctctcattctgacggtcatacttacctcatgctttcttttttgaaactatacctcatgctttcgccagggccatgcgatagagaactgtactggacgaccatacgaatctgaaaccagtttgaaattaagaatggcaatgcattatgtatgtgaaacttatggctaaagttcttccatcctcaagttattctgtgtgggacacgcatgtacggcttctcccctttcagattaagcagaattttatatgaatcagtatggctcattcttattctcggctggttttagcgttgttccatagcatggataacccattaagaattgtttgcttttgtttcagagttttgtgcaacttggtcaccaacaactacagaccctaaaaaatgatgtatacgaagcagtacactgaagtacacatctctttgttttttcagaactgaagaagtaacatatctccaagttatactgccaactgccaaaaagaaatattcagaccaaattgccaaatttaaatacgaacacattttacacatatcagctgatcagcatatgcatcgtagtgtcttgtacacgctgctcgttttgcatgtgtgctgcggtttgtttggagcataagtggccgtggttttcatgtcaaatcgtacgcagctgagagctcggcgagttagttggctgccaccacttacacgctagaattatcatactctcacgtacagcttcataccgatattcgaagttcacaattggcttggttaattacaggttataatgagcacgtacgcatctgttgcttacttgtatatactattctgtatgttaatctggtttggaaatgagtagcacgcaagcaaagcagcgagtaattaatctatatctagctagctgtgcctttgacatttcagcaggaggcaggttagttaatcttctgaatggaaaatacaagtacttaaaaaaaaagtcatggtcacacgctcgaagagttaattgcagacacgtacatgcttatttatcttcagacttcagaattccgagctctgaccatgatggc

SEQ ID NO: 50643 - DNA, 614 bp, Oryza sativa
agaggatgagatcgtgaaaaatgttctgcggcaataagccaataatgctaaatgatgattatttttagaagagctgatagcacagggaacgttctgaaacagcaacttagctgaaaaaaattgaggtgctgttgatcttctgcacaagctaattaattaactatgaggtgtcaacaccttcatcttgataacaggctataaataattgcaaattggtctatagagtaggtttgctatgggttggccttaatttccgagtaaatcactctcaaggggcatcagataatcagatatggcatcaactctagggcttattaaaagtacaagttggtggcggtgaaaattatccaaggagatcatgagagaactgtccatgtcttctagactcctacgacctttgctacgtaaacattttgttttgccatcattgtataattgtgatgagtgatgaaagcagtcttatgttcaaaagttgcctctgctagcagaggtgatgttggatgcatggataaccaactaccaagacatatcgagatagcaactagctagttgcttaattagcatcatggaatgaaaaggtatgggacagtcatcctatggtgacagatatttct

SEQ ID NO: 50644 - DNA, 1718 bp, Oryza sativa
tctccagttacagtgagaagtaacagaagttacatatgtaactacagtacatattgactgtaactgggatgtaactacaatcatgcttgaatttcttcaaaaaaattttgtctaatatacattatctaaattatattacaaataacctatctatgcaggttctgttacaattcgatctcaagtaacagtggatacataatcagagagatctgaaagagataacattaatttcgtctgatgaaaaaagaagcaagaagacaactaaaggtcataatcatgataacctagcattatggtccatatttgaccttgacagacaatttaatctagcacatatattagagatggcggctttgaaaaatctaaagacctatctatctatagtcagttacagtgagaaataagaaaagttacatatgtaactacattacatctgaactgtaactaggctataacagctttcatgcttgaatttcttcaaaaaaattcagtactcatgcagcagcattaaatattttcccctattataacaagttctaaattatgttacaaataatataaacatgcagggtctgatgggttacagtctgaaaaatcaggggatatgcaatcggagagatatgaaagtgacaaaattttgtccagagaaataagaagcaagaaaacattgaaaggtcagttatcatgctcacctagcattatgcaccataaaatgatcttggcagacaatataatctagcataaaattatatacaacaaattagagattgtagcgttgataaattttcaaggactatatatctatagttagttacagtgagaaataacaaaagttacatatgtaactacaatacatatagactgtaactgggctaaaactgcaagcatgcttgaatttcttcaaacaataaagaatttcttcagaaaaggagtcactttgtcacaatggactgaagattttcctcaggtgaaaatcatcttcagacagtggtgtttaacaaagcacaacaattagattagagcctaggataaaaaaaaacagagcattgtggtccaaacggtcatatctccagttgtgtacaaatttgcccatatattaaattttgtacataatttgcacatatctcaaacttctgtgcacatatattaaaatcactcgacaacaagatgtgacaagttagctgatgcagaagggaatggaccagacagggtgttgttgttgagcctcccgattaaatttcacagcaaatgagttcagtgactaacaagctccacacataattaacatgggaacaatattgggatgggacgatgggtcattcagaataaagaagaaaaaaaatcatacagatatttcaggcatgtgaatacctccaggcacccaagtgaccttggttttgctaccattgaaatgcattagatcaacattagactgaaaccctccaaattatttttcagtttgctgaagtatgagattttaaaaagctcatgtcgactgaaactgtgcaatagcctgctccaagattcaaaaaatactgacaattcaaatagatttacgagcgtgctatcccctgttcccaattcagaaatagtgccaattatgttcccaagttcagatatagcgccgattcaaaacaatttacgatttacgagcgatgggacaatgaacaaaagttcaaaagagaagaaagagcaaatgcaaccaataccccataatt

SEQ ID NO: 50645 - DNA, 514 bp, Oryza sativa
tagcctcggtcagagatctagagagaggcagcgacatggacagaagggggaaggcgttggagatggagaaaaggacggtgcaggatcggcaagtgtggagtcacgttgctgggttgtctgatactcacacacatggccacctagctatccagctgcttcacgcctactggtacacacaggccatggatcgattgactgaatggatggattgttcctttgatatgacccttcaaacagccaaaatttgcagtactggagttatgactgacaacctaggagttccacacggaaagcagtcgagagtagagcgtggcatggtttcaacgaaggagaatttcggaccgtttgattggcttgaagatttgtgcgtcaggctcctcgatccagctctagcgactcgtatagtggcaacccttctaccacgagaatatagggcctgttcactttgataaaaaaaaaccttatcaaattttgtcattgctaaaattttggcaagtcgcttggtaactatgct

SEQ ID NO: 50646 - DNA, 695 bp, Oryza sativa
acagatataaggttgttcctagttgcatctgaagtttaagtttcatgttaaatgaagagagatataactcaagttttttagaccatgtgaagttgacttcaaagttgaagatataagcacaatagcacctaatggctgatttgcactagacatgttccatcactcaacatctcaaaaaccaccatgatattgcatggcatttacgtatataagataaaaaaaacagcaaaaaaaatcttctcagcaaaattagcatatgaaagagtaccctgttggctgccctgttgctgcattagtaacaataactactttgagcaccgcaccaaacttgttgaaatggcgagatagcgcgtccttggtggcaccaaaatgaaccttcaaataaaattgacaaaggtataagaatataggacaagaaaccatgtgtgatgagaagacatagataccaacattgctaacatagagggttctagagtctgcgtcctcagttgggtgtgcagtgctatatgaactcgtaactgcaaggaaggacagatatattatattgtgcaataaacaatagtgagataaggtgaaacattccgtcctgatgattgtttctgatgggaatttacatcagagtgctagttcagcattatgctttgacttttgaattaaacaattttaaatggtaaaatgattttgagttatgtcac

SEQ ID NO: 50647 - DNA, 740 bp, Oryza sativa
gcttgccaaatgcctgcatttctgcaagcttgcagcagcagcgaggccagctggtcgatagtggttagcaacttttggattaagaaatctgagttggattaaagaaaagtgtgttcatattgtggatttagccgcaggttgtccggttctgaggactactagtaatgtttttaagattttttaagcatgtttgaatgtatggttgccagctgctaaaatggatatgtttgactgaccacaggtggttttggtgtcaggtgttatggacccatgtgctattgcttgcaagtccacaactccacatatgagtacaagaatagtagtaccagtagtaagcttttccaaaaatgcatttaaaaacttaagatttggtgcaattattttatttagtctttacattcatatgcagctgtttagttttatgccgttatgtggatatcattttttggcacgtctcgttataagtaaaattaaatgcctcgtcctatgcatgctaggtggtgtttggatccaagaactttagcattagagaatgtttacggtagcatcacataggctaatcatggattaattagggtcaatagattcgtctcacgaattagttcaagattaaggatgggtttttattaatattctacgtttaatatttataattagatccctattccatcgaatgtttggacactaattataaatattaaacgtagattattaataaaactcatccataatcttggact

SEQ ID NO: 50648 - DNA, 1682 bp, Oryza sativa
tcccctccggcggcgggaggcagctaggcagtggcggcagccgtcgcgcacggagggccgcccctggcggcggaggcaagtgcggaggactgggcgcaaggcgcccggcggcggtggcccgcgcggcgaccgggcgcaaggcggccggcggcggtggcccgcgcagcagcggggcgcaacggtggctagacgcaaggcggccggtggcagtggcctgcgcgacggccaggcttcagtggccttcgcgacggctgggcgcaaggcggccggcggcccacggccgggcgacggcaactgctacttgattttttttattttgtgaatttttgtagtgaatgatgaatgttttgtatattttgtcgatttgggaatggtctcacaaaatttgtggattgtggatgtgtatgtattattgatgattttgctggttgatttgtggataattttattgtgcatgattgatgatttgtgaataaattgagtggatttggggtggaggaatagatataagcagaaaaaaacagccgtgacgtgaccctatctatctttagtcccggttggtattaccaatcaggactaaagatggatttttaatcccagttatttcacccgggactaaagatgggtatctttagtcctggattcgtcctcccggttgcaaaaccgggagtatagggggtttccgaaccgggagtaaaaccttttctctactagtaattcggtatatattccgtctctgactcgtcgttcagagcgcactgacgatcgagcagcggctgattagggaggtcagagcttggtgctgatggactagcaacattctccccggctgattagggagggcacgtacgccgtctcaaggctccagcagcgctgaagagattgagctcgtgccaccgcgccattaccactccgatgactcaaattagtcgtctgctcgtaatgtgtttgtcagctgttcttgtgtgtgaactttgcgcttagaaagtcggatcgtaaacatctgttatcaaggagaaaaaaggtactgtgtaaagaacattggacaaatttcaggggcccaaacactttcacctgtatcttttattctccgcgatactcttgtgaaatcaaagtgttttttattattatatattttgtgatgaacaattgatatgtgagattactggtttttatatttcacggatattcgacgaagtggtgctaactatgttggactagtcagactaggtggtgtaggtcagtcagaccagcgtgtagtgtgcggttagaccgaccagtcaaatggtctgactggtatgctcatgcttggagttggtttcgggttgtttctttggatacttgtgattatctcgtgtttataacttctggatgatttctatgcttgtgtaatagtgtggtttgctaatgttgagtcaaggtagttgtggaagaactatgctcagatatggtttcttgtttactaatgtgtagatatgtcttgatatctcaagagagtattgccggtgatggattgggaattaagttgggagaagatgacgtccgaacaatgaggatatcatgccattgctgcacaagtgatctttgccgccggttgggaagctcttattgtcccggttatgcaaccgggatggcaaattcgggattaaagatggctacctttagtcccggttgaaataacc

SEQ ID NO: 50649 - DNA, 3319 bp, Oryza sativa
  unsure (1)..(3319): unsure at all n locations
acagtagtccatcattaagtatgtagggggttaaattaatttaaaaggaaaccaagggggggaattacctggattgggtggggttaaattttttattgaagtcctccttgataaataaccctctctataattttctggaaattttcacagctcaaatgctaattttaataatacaaacattatttcatattcatttaaacaaaaatctaaataaaaccctcctttctctctggctcatcagcctgcagcctagctggcctacttttctcccttttcctccgctccacctcggcccgcaagtacgcatccggccaggcaaggtactacaagtctaatcaacctccccagctcctttcactgtcacatgggtcacgtgggccagtgctacagggtcgtctcctacctccgtctatattgccgcatctacccgacgacacctgaatccgactcctccgtaaaatccggccacatccttagagataatccgaaattaactaagggattttgatccttgttttctcctctttccgttttcccaagaataaaagcaaaaccatgtcgtatagatgtcggaagcgaaaccctatttttttagtctaagtcagtttctcttaaaaaccacgcacgcatgcgcgagaggggagggaaccggaccatacggacgaaaaaaagtgtgacgaaaggaaaaatacgaatcttttaattaagttaagattaagataagatatattatcattaggtaggtatgtatgtactatggggtgttcttgtggcgtacgtattagggcgtgatctgagcgtagtggacctgaacgtgacatgggctttttttttttgggagaaacgtgacatgggcctaaacagatctaggagggtgtaggaaatcatggagctatcaaggaggaatcggacaaaaaaaatcgcacactacacgtgaagggaatcggattaaaaaatcgcaacaatcgcgctatatacggtagggaatcagactcaaaaatcactcgggacgatgtacgaaaattcatgggaaaaacatcttaaacttttataatagaaaaagatttaatgataaaacaaatcacaataaaataattaataattatgtacttatactacatttattgataaaataaatcacaaaataattgaatcctaacgttcacaggcctttcacttaagcatcaaagatttccaaataatcaagaatttttggggaaaaaaaatggcatgaatcgaacaatccctgccttaaatctcttatttacctccaagcagctagacaagtctagttttgctccctcttatcttggcctaacacctccccttcctccctctcccgtgggcctcttggcccgagaggcccagcccgcccaagtctgtttttgtccctccctcgttgccaggtggccctcgctacagcgtcgtcttcaatctcgcgacaagaccggactccgccatgngccgcatctcctcctctgaaaccgacgcagccattgccccctaattaaattcaagcccaaaaacggaatcccctcaaacacctcttcctttggactcggattatacgcaagagagcgatctgggagggtttttcctttgtccaagtggttggagaatcagaatatacttttgtctttcctttatttctgcaggatcggactcataaaaagagacttgcgaaaatctaaggacaaaaatatcttaaacttttataataggtaaagataaagatagatatagagtacgatgaaaacgttgccttctttttggaaggcttttttttgcctttttttattatttttcttgcttgttttcgctcttttcaatttttctggatggacttctttcacggactttttttcttttttatgggctgcccctttttacgtatttttgggctttttttttcttttttttactttttaatcgttgcatacaaatcggatctttttttttattttattcgaacaaattttttttcgtcgttctatgggaatcggactttagttttggtgactttttttcgctattttttcatttttttggacagttttttcatctcttttacggggaatcagaatcggatttttttcgcctttttttaattacgggttacagacacattttgttctttttaaggcccaattaattcgagttgatggagacataaaattaaaaccaattcaaacacagatgacataccaaattacgagaaaaacatcttcaatttttataatagtagagatagagatgtatacatataaaaatagaatatcgaaatttatttttattaaattattcatgattaatcacactaatttatttgaatttcttagggctaaattgctaattttaataatacaaaataatttcaataattaatttaaatttaaaacaaataaaaaccctctcttaagtcttggccaaatcttgcccattcttccttccgcctccccgagtcggcccgcttcatctcctccctcttgggccaccatcccgatgtctgctcggcctagcagatcattgctaattttaataatacaaaataatttcaataattaatttaaatttaaaacaaataaaaaccctctcttaagtctgggccaaatctagcccattcttccttccgcctccccgagtcggcctgcttcatctcctccctcttgggccaccatcccgatgtctgctcggcctagcagatcattgctaattttaataatacaaaataatttcaataattaatttaaatttaaaataaataaaaaccctctcttaagtctgggccaaatctggcccattcttccttccgcctccccgagtcggcccgcttcatctcctccctcttgggccggcatcccggtgtctgctcggcctagcagatcgctcccatctcccatcgcgtggcaaagaaaaaagaaaaacggaacggacgaaagaaaaaaacggaaaccttacgtatgttttaattaggtatagggactacctatacatttgtcgacaaattttccccaaaaatttgacagatgtaattacagtacaatcgtagtgtaattaaactgtaacttatatgtaattacactgtaacttgcatataactacagtgtaacttatatgtaagtttcacataattttgaatcgttagatctattacaagatttgttttggtgaggaagaaaacaaatcatagcacacacatatgtgaaagaatttgttcccaagacctccgttttaccgaaataacatgttacagagagatttttgaaagttacatataagttaccctataattacagtgtaattacatgcaagttacagt

SEQ ID NO: 50650 - DNA, 6206 bp, Oryza sativa
  unsure (1)..(6206): unsure at all n locations
ttagagtagtttggctttgcccaaagtcaaaatgtcttataccctgaaacggagagagtaaatgccattaccgatggattcagaaccttatatatctataccaagctgtgttatgatatttggttttactacatacttctgcaatgccaaaaagttgtgttgtatctagcatgcatatggtttagcactggtgtagatctgttgtataggcagggtcatggttgatttgttatgagatgcacttgataatgtagtggtaaggggtgcgtggttttaatcccaaggtcccatgttcaatcccaacacgctcacaatttattcttataataaaaactagcatggtggcccacgcagattgcgcggttagcatcattatgttttctcccatataatagcatatatgttttctcattatattattcaaatatattaaaatgacaacataattttaaattttgcaataactttacaaaactagtaatacgtaatattcaaaatatattttaaaaacgtggtaggtattaaatatttttaatatccaattttaggtatttggtaaataaaaaaatttctaaaaggactttagactcggggttttaaaattttttttttttaatccggaatttttggtaaatggaatttcaaaacctcaaggttcttctccaatattatttaattttaatttcggaattttaataattccaaatggaattccaatcgggcctctaaactcatcttccaatattctttaatttttaatttcgaatttcagttacttctaaattgtattcctatagtgactttaaactcttcttcccatgtttttcttaatttcaaattttagttatttataaattgtatttttatactgactctaaactctacttttaattttattatgtttattccaaattttagttagttttaaattcctatatggactctatactcaacttctaatattccttatttttttatttcgaatttctatttttttttcttcattgaatttctatatggactctatactctacttctaatattccttatttttaattccgaatttcagtatatggactctatactctacttctaatattccttattttgaattccgaatttcagttatttcataattggatttctatatggactctatactctacttctaatattccttatttttaattccgaatttcagttatttcctaattgtatttctatatggactatatactctacttctaatattccttatttttaattccgaatttcagttatttatttcctaattgtatttctatatatggactctagtctcatcttctaatattccttattttttaattccgaatttcaactatttctaaattgtatttctatatggactctagtctcctcttctaagattccatattttttaattccgaatttcagctatttctaaattgtatttctatatggactctgttttttctttttccctaattaatgtgagaatttatagaccatgagagcaaacatggaggcttctttttctattcctttaataatataatagatgtttgcccttcaaatctcgtttatctggttgacttgttactgtttctttatttggtcctagttgtttttgtcttccttttgtaatccatattaattctgtacagccgctatagtagcactggatcttttgtaaagcaacatttcaactatatcgcanattgattggccattagaaaatttcgttgggctactcatctttcatgctttgttcttggtgaaatgattggtaatagtttccacgggccattcaatttagcttaagatgtccttgcagtagatggccaacaataagataataaatgataaaaatacgggaaacatgtaattaacacacagtatttaaggtgatgcactgcanacaacagtaatcgctaaatgttgcagttgaatcagcactgaacaaaacaacaacacaaaggttctttccccatctctgaactgaaaaactgaccgtggaacttttgcactgtcatattggtgattttatacgatgatctaatgctagctcacctgctggaagatttgtaggccgactacaaaagggaggttggagaacttgcgcccaactgttggtggttggtgtgccgaaccctgcagcatgaaggaagaaacgatgagaacacatgcaagacagctgatcaattgatcatggcgttgggcaaagggtccaagaccacacacttaaccagggttcacaattccaacaaaaaccggtcgaattccgtgaaaaaacgaggttttgacaaatttacagtaggaaagaaaagaataacgaattcaaaaaaagaaaacactttcctgggccggattctatataataggcaagttagtacttcgcccaaataacagaggagaggggatgtggtcctggcgtcctgcatctgatcgctcccaaaaaaaacatcgagcagaagggtgaggcgaggccgccgtcttcccagcggcgtcgcatctcctttgccccccaccggatccggccgtccgccgtcccccccccccccccaccggatcccgcgatcctcccccgaagccgtcgtcggagagccattttccggccggaaaattcaatgtgaaaaccctagattggtatgtgctccatttacttttgattttgttggccacttatgctagctagtgggaatttcaccaaagccgaccgattttcgcgagcttatcagtaaactaaggaaatttgttttcaaattttgattatgaaatttattcggaatctactgcattccacctgattttgcgaaaaccgtcgttccgcccgagcttgaaacggaaggtcattttagaatcgtaaaccctgcgctcaacaaacaccacatgcacgttctctacgcatgatttatgcatatgtagttagaaagttggaccccaccagcaagattaaatctcctccaaaatttgtggattttttcaaatatttgtgaatttattaaaattcatttaaattcagtcaaaatatgttaaatttcaaaataattcggtcagaaaatgccgaaatccacgattttttcaaaatttcggcaaccacaaaattttggtgcataccgaaattagaaacactgctcaggggcgagatcctgggtatggcaatctagcgatccgatctcatgatgctaggtccgttagccggctgcctcactccgtcggtcgcatccgcgcctcgctgccggccgcggcggctgcaaatctgcaactgcaaagtaatccctccgtttcaaaatatttgacacttttgactttttaccacatgtttgaccgttcgtcttattaaaataatttatgaaatatgtaaaactatatgtgtacatgaaattatatttaacaatgaatcaaatgatatgaaaagaataaataattacttaaattttttgaataagacaaatggtcaaacacatacttaaaaagtcaacggtgtcaaatattttgaaacggagggagtaacatttacgctgatggtcactgctcgtcggctgaagtgcttatctgctgcgtctgcatgtgaaaggagaaggcgatcagcaactacgtacaccagataccaccacgttcccatccttgctaattgcccaagttttgttggttttctctctcctgatttgagctcagaggttgcgcttggagccttggaccaagctgtgcgcctcgtgttgctgacctagagcaattccaactgactcttcaaaccaaaatttcgtaaacttaggaaaaagaacgtgctccaatagatttgccatccaaggctgtgtttagtttacaccaaaattaaaattttggttgaaattgaaacgatgtgacggaaaagttagaagtttgtgtgtgtagaaaagttttgatgtaatggaaaagttgaaagtttaaagaaaaacttttgaactaaatacggcgcaacttgccaagccaaataggtagccaaaagtttcacttggctggccatatctagcaagttgaaaccacatgcctaccatgggtcccaccaccccaccttctctacccatctccatccctctcaagccgcttcctccaccgcacgagtgcacgctgtcattggtcgtcgcgcctccacctcccccaccgtcgttggggagtggtgcacgcccacaatcaattaattggtcagatttatagttttacagctttgtaatttatgagctcaagagctagtaatatatttttctcaattattagttcgtccttgatattatgttgtctagaaagtacgtatcgggaaagaaaaaggtggatgatttaataaaatgactgaaagggcccaatggacaaattcttaaagtaatattagaaagtttttcttgcaattcaattgcttactggtaacaagcatttatatatatatatatatatatatatatatatagagagagagagagagagagagagagatattatttagatgtgatttgtgggccctatttttagtttcactaggccacccaaatctcaagaccgggtgcgccggcgcgcgtgggcgtgccccggcgttggagcattacgacaagcacctcgcgggcgacgcagtagggacagacggtgctcgtcacagagctgaggcgagcgagatgggtggatgaaattgcaaatcacatacacaattcaccgccaccaaagatccaaccccaaacgaacaggacaatttaccagcgactattcatgctcaaacgctaaaactaagaacgaaatctcctacgaaatcaggatcaaacccaagtgcgcgagacgaagaacaggacctaccgtcccagaagagcaagctgaaacatgcatgacatccgcctaactacaacaccatggatttgcaaacgagaacatggacgcaccttgtgaactcgatgatgagagaggaggagacgaccttgactcgactccgccggaggcccgagcggagagaggagacagaagtagaacgaagctttgctttctctcctttttatggcttttacgggtcaagtagaaccaagtcaaccatcgactctggcggccaagtcaatagctactagtgccaagtggccagtggagcacgtacgtgcagtaggattattcctcatgaccatgatggcactagtaaattaatcattgataaaaaaaaatggatcatgttgaacatgtaactatttaaaattttgaataatggtacgattaattaatttgttctctatggtaggaactctgcatattcatttattcaagagagggattataggcccaaaaataaagttacaacaatgaggtagtttttgggacacttggtgagaacaaattgagcgacaagaccataaaatcgacaccaggctattgcaaaatgatttacactctatggcaggcttagggcctgtttagggaagcttaaaattatgaaaagccttctcagaatctggaaaaagctggattttccaggttctggctttttgtttattttctagattctacaactacaacttcttagaatctaatctaaaagctggactgtttttgagcttatgattctgggtgaagctgctgtagctagaaacttccctaaacaagcccttgattggtttgtgtatagatatttgtaagattgaatcacttgaactaagtttaccagagagggtaaatggtatgattaccaaaaaccaaaacttttagcagaattaaagattaccctggtgtgtttgctccagtctgactgtgccggaacttccgaatctgaccagtgtagatcctccggtccaaccgtctagcttctatcgccgttgtctgatgccgccggttcaaccgccttagctccgatgatctgaccgccaggtagccaccattctgaccgttgtgctcttgccagctgtgtggccatcgagcccgagaaaaacacaaattaaagaactctctgaaaatatatcaaatttatatttttaattgtggtatcaaaatgcagcaacaacattcttctctcaacttttgactaaactcaaaatctaagctaaaccctaagttttctctcaacacatctcttacaaaatcaattccgagacaactcaactcctcttctatttatacctagaggtggctgcccaaaagccacaaatccaactcatgcaaatagtcctaatccactagggtatgtttgagaggagaggatt

SEQ ID NO: 50651 - DNA, 935 bp, Oryza sativa
ttcaccaatcacgcatattgttctttaacctaaggatcccgcacactactggagaagtgatctttgtcgggttagccaaaaaccacattagtcccggtttgaataggaaccgggactaaaaatcattttttgtcccggtttagaacttcaatgatttttagttccgggactaaagatcatatatttaatcccagttgtttatatcaaccgggagaaaagatcaaaaaaacgcgcgcgccagagcaatctagaaaaattgaggagaggatgcgcgcgggggaggatactcgcacggttatagagggaaaaaaaatctatctcctccttatcttcttctcctctcctctcctctcctcttcttatcttcttctcctctcctctcctctcccttccagccctctcctccccctcctcccctcctccctctctgcccgagcccggctcggccggcaccctcctccctctctgcctctccagatctatgtgatgagatgtgttgattaattttccgatctgtgcgatgtgtggagtggataattttgttgtaaattttgtagatgtttttgtgattttgtgaatgatttgtgattctgtgttgaatgtgtgattcaatatgtgttgagaatgaactatgtttatgttgttgtgaatgattttgagaatgaaactatatgttgttgtgaagatttaggatgaactatgctgtaaatgatttgggatgaatttttgtaatgatttgaatataatggggggggggcggggggcgagatatggaaaaaagaaaaaaaaaatctttgtccaaccgggaataaagatctatcttttgtcctggttatttcaaccgggactaaaggtagccatctttaatcccgaatttgccatcccggttgcatacccggcacaataagagcttcccaaccggcggcaaagatcac

SEQ ID NO: 50652 - DNA, 1536 bp, Oryza sativa
ggcacagggccggtgtcctgctgctaggggttcagtcttgcctccctgtcccggaggttccggccgtaggtgggattgggtcggtactcttgtctatggctaggatgggttggaaactatgtcacgtcttccgtctgtataccgtggtggtatgtggcacgtggttgcacgtaaggaagatgtgtcttgtgggtaaagatgtacacccctgatcagagtataatctattcgaatagccgcgccctcggttatgggcaagccgagcaatgtacccaagttagtgttttaattcttaaaacctgcttaacaactaaaaggtggaatggttggcctgggttggcttgggacgagctgggacccagggtcgggttgccagttcggtctgaatcatcgtaggccttgggttaaggcaggttcgtgtgggttcacggccttgataaataatattgtttagttctagaatcgtatttacaaaatagctttgagcaactaaatacctttaaatgctgtttactgcaactctaaccctttataatataaccctttgtactcccttgcatttattatgcacttgtgggtgtgtcttgttgagtacggtggttgtactcagtcttgatcaatttttcccaaacccagaagaggagccccttgaagatgaaggctttggtgtctagctcgtgcctgccgtcaagcgcctgtggtcgtcgccctagtcttccactgtttcttgtttgtctctgtgtgtgctgggccttcgctgcccgtgtaataaattaactatttacgcttccgcttgttaaactctgatttgtatcaatttttggtgtaccttgcctcctgggacaaggattaatgcacgcacgtaaggaacgcccgttgggttatttccggtcgtgacaagttggtatcagagcccccttgaccctaggacgagccgtaaatcccaagccttagcaatattttcaaaaataaaaatcctttgttatttgtgaaaactgtctagtctctctctgtcttgctgcttcatttatcgccaaaatctgacctttaaaatggagaaaatccatgaaatgccattgacaagcaccctaatccaagaaatgccattgacgaatgtaacttccaggaaatgccattgtacgagccattttgtcccaaaaatgccatcaccgtcacttttactctgttaggtgccgttaattttctcaaaatgaccaaattacccttctcaacccatgacaaattaatccccttctcttccaccgccgactactcctcttcctccccttcacttcaaccgcgcgccggccactcctcttccacttcttctcccgtctgcggcggctgtcaaggaggatcgatgccgccgccgcgcctccgctcacgtcctcacccagagtaccccggtcgccctcgccctcgagctcctaccgccgcccccaagctcctgccccagcggcttccccccttccaccaccgtgcagggcccctttcacctctctctctctctcctcgacgatgacctctaatggcgaa

SEQ ID NO: 50653 - DNA, 1185 bp, Oryza sativa
cgaaaaagccattttttctctcttaaattactttgttgaagtgtaattttacttctcagacaactaatgttttagtttgaaattttgtggggcgatagatgatactgtaatttatattgctaaacattttcaaaaatcttcatcactatttacatgcatttccatttattagaagacaaactggtcttctgtgctcaaaatctatacattctcgtacaaattgaattgaaaacacagcttgtgcaaggagaaacaaaaaaatacaaatgcaacaagggagttaatgaaacaagctttcagttctgtttggggagcttaagattctgagaagtagctggttggtagctagcttctgataatctggaaaagttgggtttttcaacttctggcttctataactacagattcttagaacctgagtgagaatgtagactatttgaggagctggaaattctaaaagaaactgcaaatactagaagctcactcaaacagggccttagtacttgaaggagtaaagtgaactagaataaagtctagggagttaaatgcttcaacgaaatatttaggggagtgaaatatacatctttcatttatttttatgaggataaccatgcttgcttctctaattatactagttttgtgattaagtggtttattgttattttatttgacacaaagcgtgtaatttagcccatatacaaatgatatatgtgggtaacttaactgtagtaaatggatactcaaattgatgtaaataaaatgtgaaattgttattccatcccttggtgtaaactaatacgtcttttattgacccaagcacttcctaacagcatgtgtcttgagttgtttacttgtatttcccgacgctttacttacttgacagttagtaggacctgcctggtggcccattattcatgccattaacatctttagttattagaattgttctgtgccttcaaagatctgtgagctccatgtttcccacatctgattagcatgtacacaatctaatgaaagaactcgcactttctctccaacatttagaattagagttcaagaattgaacatcactacccatgtttggttcccggctggctcaaattatgtttagattcttcttaactaatagcatatctagttcctcctaggattctaatttaataccttaataaattggagcttcat

SEQ ID NO: 50654 - DNA, 2288 bp, Oryza sativa
cccccccccccccccccccccgggagaaaacggaaagatggagagagagagagggggaaggagtagcggaggttgaggaggtaggtgcgggagatttgctcagcgcaaagagatgactgaggggagtgattttcgtggtagggcagcctaggaaaaaattttggtggtaggcccacctaaattagataccgctacagtaaacatttgctaatgataaattaattagacttaataaatttatctcgtagttattttgttattacactacgtttaatactttaaatgtgtgtgtccgtatatccgatgtgacaaccataacttaaaagttttctccaactaaacaatgccagttctaaaaaattttatccaaaaatatcacatcgaatttctagacgcatatatagagtattaaatatagaagaaacctaattgtgtagtttgcatggaaatcgcgagacgaatcttttgagtctaattagtccatgattagccataaattctacaataacccacatatgctaatgacggattaattaggctgaataaatttatctcacggttttcaagcgatgtatgaaattagttttttctttcgtgtacgaaaaccttttctaatatatagtgaaatgtccgttgtgacatcgaacaattttcacgaactaaacccacgctaaatcccagaaattattttaggagacggaaaagacagcgacgacttgacccagacagaaataagaaaataaaagagaaaagaaaagaagaagaaccaagctgcaggcagctggctcaagagctccgggcgggtcaaggtctcctcctctctcgtcggcgacctcccttgcgattgattcatcaggtgcgtgcatcccttcacttgcagaatccatggagcttgggagcgattagtagtagttcatgctgcagagccgtttcgccgctgagcattttttgttgactccctcgatttgctcgtgctcggcgactttagtatcacccgaagatcgcgaagaactcctccttctctcgatttcgatccgcattccgttgacggattggtacgcgagttgactttgcaaggattgatcatctccccctttgggatgaacatccagtgtccccccctttgcggcgcccgccaagtgttcgtcggaatgcgcgttcccgaccgcgagtctaggcacgctgcgcgccgacgcatccggcgaagggaggccgccacgcctccgtctggtgtggttccgcggcctgcgcgcggcgctttttttttttttttggccaaatcttgtccccggttgtgcacgatcacgaactgctttgctgactgcgttctcatcctctcttgtttgatcctgcagggttctgcacattgaccgtacagcacctgcgctccagccctgttctctggtcttccagcaggtgagcaagcatataaatcactactcagtatggcagtgtatttgttgtgtgttctgttctacggatcatttttttgttcttcatagttgttagtctaatgttccaggtaatgctgctaaacttgcttgtctaatgtatagtctttctgctcactgtcttgttgatgaaccagttattttctttgaatatgtatgaactatgttcagcccacaagttgcttcagctgaagctgtatagggtgtgtttagttcacaccaaacttccccccaactcccaactttccatcacatcacatcacatccaaaactttcctacacacataaactcccaactttttttccaaactaccaactttccctaaacttctccccaatttcaggaactaaacacatgtatgttggtgaaatgtaataaatgcatactcaaattaaagtaaacaactacatacagaatagctgtacttcatgatgtataacattatagcaatgtttcttttactgagccaagcaggagagctcttccgaaagcatagtttgtccagaaaatctcgtagccgatttccgaactccaaagtaaggtgtcaaaaaaaaaatgttccaagtcaattaataaaatataacttagcactggccttcatatatgatactgtttgccattctgatttggaatcctactctgtgcccacaagcaaatcaaataaagcttgtcatttatttgctgagttgtatcttatgagatgccattaacttctcataaaacgttttatgagatcatagatgcttgtggtaaaagaattactctatggacacggtgcatgagtaccattatttcttttctcacagtggaccattattatccaagtctgaacagtg

SEQ ID NO: 50655 - DNA, 991 bp, Oryza sativa
tgctgattgatggaaactaacaaatataagcacttgaaattttggggaatacaaatccatttgtattgttgtccaaaattttcttacttttatcttttgataacctgtaaacttgaactttacagaaaaaaatactgtacagatttaataaagaagaattttttttgcaaatttattccatattcaattcagtagaattctttcgcaaattttgtttcactttgttgcaataagaacagagaagggaattattccacaaaactgaccgtgtcgtcaggcacaagaggactccacaccattcccagcgctgcatggctcagtcaaagcaggggaaaccattgcacgtgacatattactggtaggatagttctgtttgtcaatatagttctgtttgtcaatatctgctccatttcctgcaacagtagattccttatttgtcacaatttcagttggggtcgaatctgaatcttcttcatggccatctgctagatcaaccttttcaagcaccaaaacttttggcctattgggatgttccttagctgccctttcccatgtaactttagttgctttgttcacacatggatgaagaacgacttcctcaaggcgtttgagacaattaatgttgatctctgaaaggccaactagatttttacagagaagctggagtgatttgagaaacctcaaagcatttcctttgattaccgggaatgtaggacggttcagcacaaaacataggcttagcaggcttggcaatgcattatccttaataatgaactcctcaagttgatctgcaatcagcttgagatacttcaatttcctcaggttactcaaagctgaaagaagacctgtggtcaattttgtagctgatgatgaaatgcacaactcctggaggccacgcaatagtaccacaaatttgggcgattccagtaatttagcatgtaatttcaacgatcgaaggtagcatggggcttttatctcgtagaggaagtct

SEQ ID NO: 50656 - DNA, 1295 bp, Oryza sativa
  unsure (1)..(1295): unsure at all n locations
gtcttcacctcctcgttgctgcttagatcaatgggttgaatgatatttctgtccatgagcttattgaaattctcaactgctggatcaggaaaagaacctgaaggtagtgcttctacaaatccttcagctgaccatcgcctgagtagtctttttctcctgattgaatgaccactggggaacatgccaaaatatagcaagcaggctttgagagcatggcaagatagtgtagagtactcatgaatcagcacctgtcgcattctctccaaggtgtcgtcatcctccagatgattgcatagctggttgcaagcatcttcacacttgggttctcttggccagcccatttttcgcaagaattgacctactgtaagaagggcgagtgcttgaccatcacattttttcaaaatccgtactgaatcaggctgaatgtaatcttgatattcccccgacaagcatttttcaagaacaatttttttgagtgtatcttatctagccttctaattttatatacatagccattggctgaactgcaggctttagctactgattgcactgttgtggtcaccactattctactgctgaaaccatccttcgggaaggcagattcaatagtactccacaaatcttttcgcatgtcatctattacaatgaaatacctaataacatgaaacaacaaaagggaatggacattagtaaaaatccactccgtatgaacaaataacaaccatgggccaagcaagcacagcctctgttttcactgtactgtaattgtccaatccgtaggcctcacactgaattattttactgcgttaatttagttgtctgcatagtctatagtttgttgtttgtttggaagataacatgagtatataactcatggaaactatacaccgctattacactgtaatcaactaaacacacagaaaagtagagagttccaaatctagaactgaaagccaagttaccatgacacaccggagtggagttatatgacacactgtagtatcacaatatcaggttatatggtgataaaaccaatgtaccatgatagcaatgtaaaacgcaataatacctctataaacgagcatgatgctatctctatgatagcaccctgaaactcgataataccatcgtgatacggctatacaaccattacctcacctcagcacagctaccataagcctagccacctgctttcttgagagggagacagagacggatataggactgaggactggacatatatatcttcatacatcatgatatnnnnnnnnnnnnnnnnnnncgaactcgaatca

SEQ ID NO: 50657 - DNA, 1172 bp, Oryza sativa
atcatggcgaacatgattgaagcactcgggtttggagtaatctagttcgagagaagattatctttccgactgtgaaggtctcaggggctactgtggagattatgggtaccccatacccacacggcatggttatccgactagttataggggataacttatatatatgaaatatgtaacacatcatgacttgggtattacgtttccctgtatattatggaacggcctaaagtcctgctttgataagattgtaaagtagatttaggaaaccgataccgtagtggttaaggtttctatcttgtaatcctgccccccgtcctatataaagtgggcaggaagccctctagggggcatgagcacatatgatcgttagatctatactacacccgacggattcaaatccccaaacaggagtagggtattacctctcattgagagggcctgaacctgtctaaatcctttgtctccacatccatccacttttaggtctcgtgcgctaccccgttttattattgccgaattcatgtttcgacagtgttgtttggtgttctttttacgcttggttaatttcttggaggtaaacttggagctcatctccgtgaacttgcagcggcggtccatggtggcgcggtcgactgggagaagggagcgtcgatgcatccgggcgagggcaattgtgtgattttactctttgggctgggataccctaggcagttgcattgtgggctgtgtagccttaactgttgctcgccctaactcaagctacacaaaggaggtcacgtgcactgtggcatgggaggccttggaccgaattgaataatgctacacatacgactacctcgtccgaccgaggcgtacaacgatgcatctccaccgtagattaatatgtacccatggccctatgccctgatggtagtacggggtgcattggatgtatgagtcagaatggagtcgtacactaaggtcgtatgtatagcacgattggaccgaattttgagtttcaaaagggccagagacactcatagagtagcttgcactgtgagtgtccttagcttggggataagccaggatagcgtggaggataagatcggcagctggtacactcgatggctgcctatacggcctaaattagggaggctgacgtggctaagtctttccttcctcattgcacttat

SEQ ID NO: 50658 - DNA, 833 bp, Oryza sativa
cccagaaaaatctataaaatagaggagcaagtatagtatttaataaaattttatctaacccaattttatattgagatttagcaaattaaaattagatcttctcttttaagcttttaaaattatttctaataattccttttaaacaacaatttataatttaaggattttaaacaagaaaaactcttaacaattataattagatcattattgatcacatatttactgaactgttctttgtatcattaaaattaataattgagctccgaaaaatccgagaaaattccagagagtataattaaccatggagaatttaataaaaattaaatccatccatgctttatatttaggaaattttatttcccacatttaacttcacttgtaaattaatgaacatttaatataaattctattaataatttattaaataatttataaatcctgaaacgaaaatcagggtgtgacatggttggcagtccgaccggggagcacgacgattagaccgacagactccgggagggagtcgcttttctggttgtttttgtggattttctagtttgctttatggatatgacttctatggtttctatttgtatgtgatactattgtgcgctggtgtgagtccagttggtgtgaacttgtactccgatatggagtttctttgttgttcatgtggaggtgttgcttgaggccatggaagtatagccggtgatggatcgagactaggcttgggagaagttgaggtccagacggtaaaggatatcaggcgggatgctcaggctagagaacaatacatgtggtggtgaaggtttctatatggcatacacgtggtgttg

SEQ ID NO: 50659 - DNA, 3614 bp, Oryza sativa
tttcgcatgcggtcgttttcgagggtcaaattccggtcaactcaaataatcactgcaggtcgtcgatcgagtctgtagctacagacttaatcaatgatggattagtaataattgttattatctgtcacgattttgtatgtgaatgtgacagtatgtgtgcccacccggccgtacaaatgtgattagtctttggtttcgtagtaatccatgttagcctgagctatactataagctaggcgtgcgtttatacgcgcagacgacctgtttgtgtcccgtcgatttcatttgccacgtcagcttgctgcagacccacagttcgttggctggaaaatgagagacgggaaaaggaagaaggggatgaatggagaagccatgggtattttagtcctaaaatataagaaaatacattgaaatgatacgtagtggtacatcgaaaattataatgatatggttacaaataggtgaatagtaatggcatattttaaaaccataaaaattataatggcatggatcaagtttcctctggaaaggatggattaagttttggattttcgtggcacgcttttcaaaccgctaaacggtgcgtttcgtgcgaaaactttctatatgaaagttgttctaaaatatcatattaatccattttcaagtttgtaataattaaaaattaattaatcacacgttattaccacctcgttttacgtaaaatacttaatcttcatctttatctttatcttcaggagattcaaacacctaaccaatgaaatatatactagtattatgaactcggacatatatgtctcattcattatggttattataatttgggatgaaggtagcatgacattttctttatagattccaataagaaaatttcatatgaaatactttagaataaaggattaatataatatacctttgaaattgggccaatccatgagacttttggaggaaaataattatagggttgtaccgcatgtttctttcttcctatgtctcatcatggttcctgtgttttcttatgtgttattcaaatgattttaaaactttgcctataattttatatttttctttcatgtaatgtgcatggcatcctatccatgtgttttcacaattttgcattcagaaggggctttagatttttttttatccacattgatactaagctcctcttaagtatcttacattttcttctaaattttatctctcaatatcttctattacctcaatcccaggatataatgatttgtagggttgaacataagtattaagtaagtagatggaattaaatgtgaaaagattttgattagtagagaggagaaagtaggtgaggaagttgttatattttagaacaaaatttaaatactatgttattatattttgagatagaggaagtaactcacagtgaaaatataaaaatacatgagaaagaagatattataaagagtaaatttaagaaaactgcaactttagtgacaaaactatcagtttgctacaacattagcaacatgtttcagtttgcagcgacatgtttcagtttgctgcaacaataacttttacaataacaataacaatagcatgtgaaactatcacaaaactataacttttgcgttatatgctgctacagtacatataggtgacaactgtagcagcatataacgtaaaagttgcagttttggaataatttttcacgctattgttacagcaaactaaaacatgtcgctaatgttgtagcaaactgatagttttgttactaaagttgtagttttctgaaatttactctattataaatgtatgtgaaataatatatcataagtcaaaatttactatgtgacgctctaactatgcggcattggacatatgtgacactaaaacaattatgtcactaccactggacacttctatttatcgaagcacactatattcactatataaatatatttggttcaaataaatactcatttacaaataacgctttgtgtcccttagccaaatcattgcaccaatcgattgccgattcgagatctctaatcccttgccactcccctccccaaatcaagcagccacatcttcgccctgatccgtcaacaatgttttgtcttctggcgataggacctagtttgtggacgatggttgtgtggtagtggtgattgtgctggttcgctttaattaacaaaaacaagttcgtttggccaatcctgatggagcttggcatcgctgaattacttgtgaatccatcgtcaaatctcctataattgattagaattcctcttgtacgtgatttgaaagatatattcaggtgagaaacctcttccctccggtgacttgttttttaaaaactagtacgtacacatttacggtatagagccttgaagaaaccaaaaagaaaaatagaaagaaagaaagaaaagaaaagaaacgaaaaaagggagaaaagaagaagctaaagcgaaagagagacattgattgaaggctctccgcagctactagagttcactgagatatatagcaacagtggtgaagggatttgagattaggggatgagagggtggggataagcaataagaccgagagaacttttccggtacaacatactgatggtatacactgccagtataaatgatttaacagtgcagattgatttgatcttctaattaattggtttgcagtacaaaaatttagaagggtagatttgtctttcgatgcggtggttcaggtccggcctctccctccttggtggcatcgttagccgaccaagggctctcagcatgcaccaattgcgttgtcgggcacgcacacaggtgcatgaggttctgtggccacttctagcaccttcaaggtgctgctatggcagtctctggaaactaaaatttgcttgcatggacaacagcctatagcaccgacatatgagaataatctaggtgttgtggtgtatgttagtattccaaactaaaatgagatattgtgttttttacgtgcgccgcaaatgtggaatatgaaactgcatttgtcaggtttgccgccgtctctcgtgagtgtagccaagcagcgacgagtcacaccgtcgccatgcgcacgccgtcgaattgcgtcgctgccagagctcgtcttcccctgtctctcgcgagcctgtcttacacattacgtcacaaatataatataaggattctataaataaggattaattgagcctgaataatgaattacaattttttatcaaattcctaatttacccttgtaaatactagcagcatatactgccagtacaatgtactgtaaaagttctcaagactgattgaccaatatcaatagcaaagaggtcaaatagtcactatcaataacaatcaattcgtaaactagttctttaaaaaaaacttcaattctagctctttaataatatcattgaaagtttggaacaagtctttattgctaaatcctttcaatctaaactactgaataatctcataaataagtatattctattttaatttgaaaaaaagatgagaaatcacaaactaaatttgaaatttgtagatcatgttctttctaattttttttcagaactgatcttgtaattagtacagccatataacaacaggtgttgggggggggggggg

SEQ ID NO: 50660 - DNA, 2483 bp, Oryza sativa
aggtacaaaaatcttcttcatacgagtactcactgctggctggcctttttggcctctcttcccccttcccctttgtctatatatcctctcaagcaatagggccctcaaaataggcagcaaaacactgcagtatattactactacctcatttctaagatatactaacctagaaccagattagatatatcatagtactataaatttagacagagaacatgtccagatccgtgatactatgaaatgtccaatttaattataagttgttatattttaggatagaggggtactctactagcttaaggtgcaatgtgctactgcaagagaagatgaaatgcagcacagagctggctttatgcaaacatcaacacatgtcagtgttttttcctcaagaaaaaggttcctagaaattccttaagagatcctggtcgacatgcttcgtgtctactactctcatctctactcttctcctttccatttcgaatggaacatacatatgctaaggtcttctagcctgatcttttgcttctttatatcaacagtcggcaatgatgatggatggctaaaataaagttctagcctctagtagtgtagaggagagtgtacgtgacagatcatcaattaaagttgcttagccaggctaattaactagtagtactaagtactaacacggttatctataagatcaggcaatgtctcacgcactagtgtactactaatatgtactctcgaactgtcaagctagcatcatatctcagctgcaatatcggtgcttgcattacagtaaaggccagcgtgcaattgtgcaagtgcccttttagttagtctggttaacaattggtttaacggactcggctattaattaaattaaaggctgtgttaataagctagattaagagagatcgcgactgattaattagatcagccgcttctcattcaagtaacaccatcctggttaagcaaaccgcggcaggaattaattgctgttgcacgtactgcattgcatgcttgattagttttttctgtgagcacaacgaggcccggaggccgcacatcgatcctacttagagcaagtttaatagtatagcacagtattagctccaaataatctataaccaatataatgtctggttccacctgtcatatacacgttacgtctggaagtccttgctacagctggctacagatctgtagcccgctgctcttctctctttttatttatctctttaaaatatatttatagttggcttataacctactatagtacttgctcttaatgtgcacgctacacataccacaatttttcgactagtcgttagtacataccacgtatttgaccaaatttaagtacggtgggcattgctgcaaaatgacgggaagtaaccttcgatctgtatttttttatttgaatagttatttattaaaaaaactatttgaataaaatagtagtggttgcagtgacatgagtagcacccaaggtcctgagtcttcgtatgagcaaatttcagatttgattgtttaaaggggcggatctacaatataaggaccggtgtcaggcgacaccgatgactttcggcaaaacctatagcaaaactgcttatccatatattataacaccatgatctaaatataattagcatactatgataccgatacacacgttatgacatcaacgaatcaattttctgatccgccattgttcacataaggcattgctgtaatacagtaactaatatgtactcttagcatatactgtattcttgacatctggattttggacagtggggataaatgtttgtttggacatttgctgcaacaaaactgaacgagccttttgatcggcacatgatgctattgatttgtcgtctactaagcacgtagctaggattcgagtcgacgcgttggctgacagcggcatgtgtgcatgggaggagcctactatcaagtatagtattggccacactcacatgcatgattattagtgtgaggagcacgcacggccggatctagcagacatggcgtgtggattttgtcctgtcgaatgaacggattccattctaataactaatccaatgaccccaacgctatgcacaccggtacatgcatgaactgagaagtatcatcggtggagttgcgcgtgtatggcttatattccaggctctataaatatgaccatgtgtatccaagaagagaaagtttgtgtttagatccaggggtaaaaagttttggcatgtcacgtcggatatacggacacatttgaagtattaaacgtagactaataacaaaacaaaatatatattttgcctgtaagctgcgagatgaatttattaagcctaattaattcgtcattagcaaatatttactgtagcaccacattgtcaaatcatggagcaagtaggcttaaaatattcgtctcgcaatttacacgcaatctgtgtaattagttttttttatatactccctccgtattttaatatatgacgccg

SEQ ID NO: 50661 - DNA, 699 bp, Oryza sativa
cattagttttgttaaaaaaattataaaaatgtataagatataaatcatgtttaaaatactttgagcgataaaacaacttataaaaaaaataaattatattacataaattttttgaataagatgaatggtcaattatatgattaaaaatcaacggcgtcatttattaaaatgaggttgtatatactcttcctctattttatattataagtcgttgatttttttcagtcaaacctcgttaagtttgattaagtttatagaaaatagatggagggagtactgtagtagacagtgcagcacgtggatgtgtattttttatatgctggagaatttaattaccaaaaccatgtgtatatagcatatgattgatatctttatcattatctaaaaaaaatgattgatatctttatattcttgcgacacctttgcaggcgggcgaattcgacgaagcgtcgctcaaggaagctatcgcgaaggccgtcgagagtttggtggcgccgccgccgccgccgtagcccgtcggctttgaccctcacctcgacctggtccggccagctcgtgatcgatcgatgcgtgcgcttccttcttcgagaagttggggttggtgacgcgtgcacacgtacgtacgcatttggggcttgaacaagtagatcagtttcaaatcaagatcattttctcttttttttttttggaattttgaag

SEQ ID NO: 50662 - DNA, 1279 bp, Oryza sativa
tttggggaatttggctgcatcatgggatctttttggaaagaaatgagatatgtatatgggatgcattcgttgccacaggagtatgagataattgtacttattactaaaggtgatctgatacaagacaatagtggattactctgttcagcgtcagtttaatttggcaggattgacctgggtgaggaaccattgttgcatagaggcgcacacgaatgaagactaagcttgataaccacttttgcttgctcaaacccatgcactaacaaggtacataactcaaacatggtgttcgtttcttctgcactcataattgtttgaaatatcttagcaaaaagttgcatgattcttcttgtccatgctcctacaagtttattgtatcttaagcgataggtggtgagtagtgactagcgagcaacttatgattaggcctgcactttgcattttgtatcttctcttttggtctctacacatcatgtccagattcattttagaagttatctttttttaagacagagagagtatgttttatagtacagattatgtccatcttgtgaataacaacctttttatttgggttcgtctaggccgtaggatcccaagcagttgattagattgatttcagattggatcaattatcttgctgagtgcaagatccattgtaggttttgttgggttccggctagtgagggtacaaacaagaacagtattaaacagctcatgttgtcacatatataaccaggctaccttttcccgagctccgttgctcagggaaaaaggtgctcacagacatcagcataacacaaggacatcaacataaaacaacgatgtggatcttttactagtttatgatctgatttgcataaaacaagaatctgaatcaaaatgtctgcattaattaaagatctgactgatcatgttttaatagcaaagatatctagttggtctggataaatcaattggttagtaaatagaacaagattggggtcggtatagagcttttgtttggtatgctaagctttcctgcactgttatcaatgccaccaaacaaatagggagtgaggtattcccaaggcgaggttaaacaacatgccatttttattcgtggccagagacacgcttttgtttacaaattttactagtttcactatctagattctctgagactctgagccgagtgtctaacttggtttcaaattatttatagaaaaaaataaattggaaacgcgtgagcggacacattagaaataaaaatggatcaagcaacgatcttggagtgcgg

SEQ ID NO: 50663 - DNA, 699 bp, Oryza sativa
gtgatcctgaccgtccgatgagggatcgaacggcgcagatcaggctcggcatctccgtagccgaggccattcgtctgggcctcttcagtcgagcctgttgggctgtaacgggcctcatgccttcgctttatatgttgggctgaaatgggccttagtcctttcttgttgggccttccagtcgtaacgatcctttattttttttcttttctgcttttttttttgtgctgattagtttattattattgcttctcccacggcgtcgggttgggctgtgctctctgggcgcggcgacgcggcggcgcggcggcgtcgccggcggcgggcggagatgagttgttgcaggtatacgcggccttctcatcgtcttccgctcctagaccctgggtttttgtgttggctggtgagatggaagcgctggcgtgatttgccctgcgacgctgcgtcgtcgctcaccacatgttcggcgaaatgcgcccccggccaagatttgtggtctggtacctttcttgcgtgtggcgacgctgggtgttgagctatatgagcttgtagaggtttctgtgcgtccctgatcttgggttcggctgtggatgtggtggtcggagaagcatccggcggtgccttagttagtgcagaaaattcggcgtttctttcggcatttttaccatttacggcttatttgcaccggtataaagttaggtg

SEQ ID NO: 50664 - DNA, 812 bp, Oryza sativa
tttgaatttatgcaattcaggcttctgcaaactgaaacttgataaggttttcagccttatagacaagctcgaaaaataggcttttcagcagtacaccttataggtgcatagcacactgagatatagagatcttccaaactgaaaattattatgctatgccacttttgaagttttctgaaatattcagttcctatgcaataggagataatatatatagctggttcttaactacatcttcaaagcacacactctccaatgggatcctttgcatctgaacttggtttccagtttgaagtttgcatggaagctcctcatatcaatgttggttctctggtatatttgttgcaatttggctctgctatagaactgcatagccttgagttgatgaatttttgctatagggtgttaagggcccaccttagaaatgttctttcatcctaaacatttcatttcaaacattttagtacatttttctcgaaatgcaatgacttcgtacaagtctcattcattctggtacgaaacagtttctttcctatcactattagtgcaatgatacacaagccttttctgtattctcccaggcatcaagtgatggcaattggcgctggagtgtttacatttgattagtaggcatactgctagccctaaaaaaatgtggatattgctaaattggcatgccaatctgtacaatgtgtggttaaaaatagcttgactgatcaaaggatatgaaagctaaatattttgcattaactgacaaaaatggaactacttgtctcactaatttgaactctacttatatctaactctaccct

SEQ ID NO: 50665 - DNA, 1940 bp, Oryza sativa
aggtggggaacgaatctgatcgctaccccatccccacggcgatcgatcgcccattatgggtcccctttcgtgtagcaacactcggctaattaccaattggcagtggtattaacatgtttacttcacgctagagcatcacttgatcatctttagtagtactaactaatctttacagtagcttgaagcaaaaatgttgagttgaatcccagaaaaattgcgaatctagaggaggcgaggtgagcgtctgttgtgcggaatgcagagacattcgtcatccttcccggaacgccaaaccgggattcgcggtgaagaatcttagtggagagagtgtgatgagctctccgagttggctgccaactgcctgctcatatgcatgctctgctcaagtcaaatttgatcccatctctgacacttccatcactacctgtttatttgcttattatatgctcctccatcttacaactcgatctgagagatgcagttattagttataaaaattgtgtatttttcagggttttaaatctctcgctatctcccgttataactgtttgagaagggttctaactatttgctctcatatacaatttagccgctatagctccatttaggtagctatagctgtttgagaagctaaccgctaaatgccttaactcgctatttaaaacattggtattttttgaactttcttaagactttttttctttttgcgaggaagaacttcttagattagtgctactatgatatatacgcttttctgtatctgtacttattgtgaaagagagagagagagagagagagtaacatcagtgttaacagtcatttggactggacaatacaaactactacatgatcttcctgttcatctgccaaatgtgtttgccgaatgctgttaaaccctatttcaagtttgtgatcagcagctcaggtgctacattaccactaatgacctcaagtactactcgtacttgtataatcagccggataaatttgtctggtcgcctcatgttcagacttcagatgggcggctgactgctcacctattcagagttcagacggcggggctatgaatatgccttagacaaacgaaccggtcgtacatgtttagtgctaacaaatactagtactccagtacctaacaggatattttgacaattgtgagattctactgatgtaccacatttttctgtagcggacggtatgtcctcatcgatcaagtttgattattttatcagtggactcaacttctgaatttggccgggatgaacaactcccaatgttcagacttcagaggcccaccttatcagccccacaagtagagcccatgctgcagtgcctgttcttctcactcaggcccgatccatgtctcaacaagaaagggaaatgggccctgttgcaccaactggcaactgactaaatggaataagttcctaaacggtgtgattcttttttttaaaaaaatacatatgaattttataaaacattgttttaaatttatttttaactttataggagtaaatttaatttatttgtcattcagccaagaacgacactccgtttttgctttattttagctactgtttcacctgacgccctctaaagattaaaaacaaccgacaagtgtaaaaggatccatttacaaagataatgtcgacacttgttacacagagtttttttttaaaaaaaagaaatagcatgatgaccaaacatggaggcttatgatgtgcgattagttgcaggcacgcccatctttttgcctgcctgctccaccgatgtttattcgacgcgctgaacaatcgaatgcagacaagataatctagctaccagcttaacacaccaaaccaatcaattcatcagcatttaactaatccacgaccacaaagaggatggaatcgtggcgtttgattgtttccaaccgctacagccatatgcccattttgcat

SEQ ID NO: 50666 - DNA, 1308 bp, Oryza sativa
tccaccaattaagtccaggaagatttgtatatttcagaagtctaggaatatatatatatatatatatatatatatatagtaaatttgtttggtgctccatggtgcccgggcactattgttgaaattgagtatatacccaattcaaatgagtatgaaactttttcaattacttaggtattaacattaactactttactaactagtttaaagcaagtttgaactgaatttgaacttgtttttgttagattttgattctaggtatatagcatccatatatataattagttaggtatgtaatcatggattgtgaaataaagttaaatttgagttgttttgttgataagtataggtatgaatcaaattattataactaggtatatactcacaatttgaaaattttgaaaaatttgagtaattttgtgcattagataccatggtgcccgggcaccatggtgccccatataagtgtcctatatatatatatatatatatatatatatatatatatatatatatatatatatatatatatatatatatatatatatatatatatacccttatatttcagaagtctttgatagagtaaactaaatgtgtgaaattcagctatcgacaatgtcaactctatcttagacttctaaaatataagggtatagatatctcctagtataaatcaagagatataaacctacgccactcaaagacttgagaaaaactcaaaaaaatataaattaatttctaatcatgtactacccatgtagtattagttttggcacttcgagctcccttcatagagggatctctctcaaggaatgaggtgtatatgtctttctaaaaatgggagaaaacctcataagtatatccaagtataagggtggcaattgagtttatatgtttaaatctcagcatgaagatctacgagattcggccgaaatggaaatttatacaactagcttccatgcgaggacatgacctgacatgtttgacagaataattatgatttactagaaagaaatttccttgcttggagtagttctcgctatcgttgcaacttatttacacggataaaatagtgtttgtgttcaaaaagaaagaagaaacaatgcataggactcgtttacctagatacatgggcttagggttatcattgagaaccgacgggagaagctttgcaaaagcacagtcccgggagtggccttggggccaagtatgccatcctctcaatgcgtggtcatttccttagtagcccaaagtgcgagagtggattctaagctctagaggacatcccctcatcattcacatgtc

SEQ ID NO: 50667 - DNA, 1648 bp, Oryza sativa
agtggacagacctgagaaccaacttataatatagataagcggataacccagcgcacttataacctagatctagtggtcggtgcgtgcggaagacaaggccatcatccatgtacaagaaggaaaatacagccccacataggatcgtatggatgtcaaatcaaccatgtaagaacatatcatgccacacatggggaagaatgataccttggttgccatcctaacatcatcaactgagatctagtgggtgatgcatggggaagacgggctcatcatccatgtgcgagaaggaaaagctagccccgcccaagatcatgtggattccaaataagcaaagtaagaacacatcatgccgagataaggaagaatgataccttggccgccaacatagatcgactagctgatgagtggggaagatgagccgccatccttgcacggggaaggaaaactggatcctgtacgaggaaggggagcgacatcagcaaccacctaaacgttgtccgcgcaaaggccccagtcccaaatcctagatctaggcaaccaacaactagggaaggcactgtagaatgtagcgttaggtagcgacgatggcaacgattggcttgatggtgttggaaggacggcgattcgctctcttgatgtcatattggtgctagaagaacgaatgtgagcaccagatctaggggaatgaaagttaggtagagtgcggcggaggggtggtggtggatggaggggaagaagtggcatcttctacccattttagggtttagcaatggatttatataggcagggatggtacattagctttggcccaattaggcccaatagacggggatggtaaaatggttggttgttggctttcatttgttaaacgtccccgtccccagtggcaaataaaaattgtcaaacccaaacccaatagtgacatttggatggacagtggaaagaggaagggatattatggcatataaagtggtggtttaagataggataggatatactttaccattccaatgttcaaatacatatggtttggtatagagataaaatatttattggacgaaaatacccttcctgactatctggttgtggcaatcacacgacatttttgtcatcgccacccattccgacctaaactcaccttccccaatattggttggaaatgaaccgtccatatcctgttcttatatccacttcttttcccaatcacctaaaaaacatggaaatgatttcttttcaagaaacatcaatgtatcaaaattttcctctggttccaattatcaccttttttttttcattgatttcctttctcatcgagactcacttttctcaatatactttaagggtctttgaagcacaatattcaggaaatggatgaatagaaaacaaattacaagaattggaggatggcataacatatgaaaaatatagaaacaaccatttaaatagactataggaaaggaatcggataagaaaggtagactcgggaaaaaaaatgaagttaaagcttttgctaacttttcttcaaaatctacatgcatttactcgtcattgcttaaaaatttcattgaatttggaaatgcccaatcctctgtttcaatgagccgaataggaaaagttcctacatgatttaaatcttatataactcatg

SEQ ID NO: 50668 - DNA, 2498 bp, Oryza sativa
ttctattttttgatcaaaatataaaagggactacgaaagaggaaaacaacctccaggttaattttaaaaccatgttttaaaatcataaattggttgcagctcaaataacccatgggtattagtgaggtgattaccgccacgtgaaccctgtgtttagctttacaatgattgtactgcagctgtaagcagtgatgtgttcttgcgcatgcaggagtataatcttgcgtgtggcctaacgactaaagattgactatacaggagtataaaaggaaggattcctgtggaatgaaagtgtcacaaccaccaccactttttatcctctgttgaaatataattaagaaaggaagaaagaaacttatgattaaacagctgactaaagtgtgatctttaaaattggcagaaagcgagcgtgatggtgaacgtcacggtacatcatattgggaggaacgcaatatattaggtgttgtgggtggaagtgtctttgctgtatagaatcgtcatcgatgagtacaatgttattactgaattgaatcgtctcatttcaccaagtgtaagggcaatgcattattattccgttctaaggagagaaggagtaagcaatttaattttctctcgcactctctcgtaagaagagaagcaataaactttaaaaaaaaaatacaataagactgagttagggagagcagcttgccttagtttttttggtggcgcaaaatataagcgattaccaaatgattaatcgagtattaattattaaaggtttcataaataaatttatcttatttttaaaaagaaacctctacatagaaaacttttgcgtgaaacagattgtttattagttcggaaaacgtgctcacgttgaacaaggaatttttttcagcgcaataactcagcctatgggtgggtttgacttgaacatttagctagagcaaattgtttcatgtaaatgagacatgtcattaacgaataattaattaagtaaacatgaaaaattgatttgcttatttttttaaaaaagcttataaatatactacctccgttccaaaataagtgcagccatatatattcgtgtttagcattttgaccgttcgtcttatttgaaaattttatgaaaaaattaaaaaaaatagtcacacataaagtactaccaatgttttatcatgtaataacaataaaaatactaattataaattttttccaaataagacgaacggtcaaacgttagacatgaacagtgctaaaactgtacttattttaggacggagggagtattatgaaacaaaccatttagcaatttaggaaatgtgcttacgagacataagaaaatttgcttggccaagtagctcaatcaaacttggcctaaatttaagtttagcctatgtccttcaactaacatctcaccactttcttgccacacttcgcccccaatatgatatcccaaaaaaaaatgaaatcccatcgtcgtcaacatagtagaatacacttcttccattctaaaataaacaaaatcttggtacatatatgacatattctagcactatgaatctgaactatccaaactatccagactcatagtactgagatgtgccatattctatactagttttatttattttaggatgaaggaagtagagctctaccatggaccgagagttgctcgaacttgatcggagaagctaccgtctattttggtggtcaatcctgagtggaatggggaaatagggttcgagattcgaggatggagaatgtatatatcactagtcttttaactcaagtacctagatgagtcaacgaaatcaccacgtcggtgatcaacgtggtgcaccctaaaacgggtgcccgaacatggatatctattatatttggtgatggacattactagaaaatattttttttacaaaccgtcaaaacggattatttcaggcggccattcaccccgcttgtacttcaaggcttacgaaaatacgtcatttttataggcggccatcggtcccgcctataaaaatgattttcgctggcgatctctccatcttcgcaggcactagatccacctgcctaaaaaacattctcggtgaaaaaaaaaatcccccgccaccactccccacccgccgccgtcctccccttctgactagatctagggttagggttttgggtggaagagagagaaggagagggaggggaggagtggggtggggaatcgtgtagccatcgaccgccggccgctgccgccctccctcctccggtcaaatctaggagggagggaggaaggaaggggaggggagtgctgcctccgtcgccgcctgcagtggctggccaccactgtcgctctcctccttaggccagatctgggagggaggggaggggaccgctgcctgtggtggctgccgccactttcgcccccctcctctagccatatctgtttgcccccctcctctagccaaatttgggagctaggtgattttatagtctatttaaaaaaaataaaatcgtggggggga

SEQ ID NO: 50669 - DNA, 2912 bp, Oryza sativa
tcttacaaaccatcgagtcactggaccgcttgtttcactcgtttgagcaactgttctggccaaagcatgaggtcatacgatcacgtaaccaagttaattttcttattcagctttactctatccccttacgttatgtggttatgccatattctcagttgttatttgccatttgcatttttagatattccattttttaaaaaactgcattttagattgggcccctgccgtcgatcgtctctacttgtcacatgaatgtcacaagactacaagagtttggttcaagttgtttttggcatttttctttagtacagttggatgtcacgtataaccgtgtcacaacaccaattataaggatatgtggggctagttttataattattatcaattctgaaagaatttcgggatgatataaaaatcattagaaagtagacttgatattttttttcatgaaatccagtactatccaaaatataatttgtataaataattcatatgaagtcagtgctgctctattggggtctgaacaggactaaaaaaccgtgatagttcttctcgggttagaatacaaacggcttacaacttatgcctcatttctctagaccgggatatttcactattttactctaagagatcctcaacttttgggggaatttttttttttggatgaaattctatacctatccaggaggtgatcaatcagagaagagaaatgccctcatgaatagaactgatgggattggcaagtaaagttgtatgataatggctcagttctggaccggggtaactctaattatcccctgcatgtctgtggttaaaaagagttgatggaaggatgataatttggtggaactttaacttcataatattttagccataacaaaagaaattaaaaagttaacagcttcaaaagtataagtctatcataattttatcttttttttcatctctatgctactatgctagtgggagtgagagactagagcttggtgacggcatggtggctgggcagtctgctccctccttcccacgctcacagttggattcaacaatggcaggaaacaatcgtagcacgacccgacctaacactacatcaatagctttgccaccggctgcatcaggaacagatgaagtggcaatagattggagtgggcacgacggagtgaccagatggctgcaatggtagagggatggcatggcggcggtaggtggtcgcccttcttcttaattagggttggccacctacggaagggagctcgagagggccgacaagtgttgattgattggttttccagacggatagaatgcggatgaggatttgcttgagtttgggctacttattgagatcgtcacaatatggttttgcgtggtagggttcgttgggcagcaaaagatcggtttttaacaagacaaatctggcatcaatttttctatataaacgttgtatgttggttattgctgtgtataacaaaggatcaagattgaagcgagctagctgacacaagaacagtgaagcttagccttctaatcttttattttttatgtattttgttacgagacttggagtttcagtattattgtaacttttggctatatgtatccacttacgtattgaaaggtcaaatttctattcattttattaaataataacaaatttgaagataaaactttatacatgtctataatgctattggaaatacatgtacaatttttagtgtatactgtgtgtgcaaccaaaatttctgactacttgataccccaatgtcagtatcccgtcgaaaccttttataacgagatcagccaagctaaccaaactatggaaggcttgacaaagttgtctggccacttttaacggtctattaataggccgaaaacattgtcttcagttcgggtaaaaaatctcatcaagaccgcctgtcacttttggtatgaactgacactgataatatagatccaaatataaaatttgggatgaaaaaaataaatatattttaatacttatagcatacttcccgtgtacatagcccgaaccactagtaccttttttttaagtcgaatgtaatccttgcaatagtggggattcaaacttgagaccttccatcacatacatatatctttactaattcatctatacataaattctgttagcaaatggatattttcttcttttaaacctcttaactgagatttgaatcatgaatttgagtatctaagagattcatatgaaaaggttgtctattacaaaatcgtatatcttgtcaaaagctacaattttgatttaaactttatcgcaattcaagttcttatgaaaaaaaagttaagtttatatccaaaaccgacgctaatatgatcaggatcatcagcgattgtacatagctagaacactagcacaactgaggtactcactagtgcctatttatggctagaaccggcacacataatcccaacacaattttaaaaactttaccaccgataattattatgtgttggttaagccattctaactcaagacgctagacacagtttctataaactccacatcataaaaaaactagtaccagacactactcttccaatgcaaacaccactattccacacttaaatttaatgctacttatctcacatgatgccttggatattgtgtagaaatcatgtctcatgcaagacatggtttccttctcttttctcatttattcacttaccacattatttttattctatgtggcaacttatttaatgctatggacaccatcctagtcattagtaggttgggaatggccttatagcaagggatcaacgttgataagtgggatatcagtgccggttagttaaatagataagcattgattgtccccccataatacgatactgatatggtcatcagtgtcattttttgcctagagagaacgcaacgg

SEQ ID NO: 50670 - DNA, 1230 bp, Oryza sativa
atttcagaaataaatttcaaggccaacttgtgggtacaatcattttgtttgcactacctaacacagtagcactcacacacattttattttgttctgaagtatttaggtgtaatgacatccccggatttcataaagcttgtgaaaaacgaaagcacaaaattgcagcataactcaatattctaaaatggcaaaaatttacagttttgtagtgagctatcaatatgcatatcgaaagcctgttgtaatgaagcaagggacaaacttgacaactaacaggtttattttctaaaattgttttggctgtttaatggttacctttgcaagaatataacggggtcgactgccaatccctctcacaatctccactagggctgagctcactttgtaattaatttctaagctttcttcaggagctgcaagataaaaattacaatcttgttaggagatcaaactactttaagaaaaatatataaaataacaaaacatatttttcctggcgtaaaaacaactgttgtcaggtaagtcagataacagtaacatgtcatgaattgtcattgctttaaaagaaggtaaaatagctgtcctcataagtactactccctccgtttcaggttataagactttctagcattgtccacattcatatagatattaatgaatctagacaacatatatgtttagattcattaacatatatataaataagggcaatgctagaaagtcttataatatgaaacggatgaagtattttttaacactgagttaggtacttcattgagcctccagggataccaaaataaaaatttaagtagtaaacatgttttaaaaaactgagctagacatttttactatagcacaaaattttcaggaacaaaaaaaaaactaatttggttaagatttggtcattacaaaggttgcaaataataggtgttagttctaaataagcttatttcttgcacttttagattatccatatccctagattgacaaattctggtctgtcttttggtacagttaatcttggttaatgccaacaacataagaaaaaccgatagtgaagtatctccaacagaatgttgagagaacatgataatatttcttggatcttacgtgcttatcttgataatcaaacctctacactgcacaccttgctcacaaaattcgccaaatggatgtgtctcaaggcattagcgataagtcaagatttaactcagcatttcaatctcgaat

SEQ ID NO: 50671 - DNA, 1210 bp, Oryza sativa
atagaatttgaatatgatttttagtggagtggtagatgttagtatctctaactggcaaaaaaccccccaaaaaaaaaatttttttttttaaaaagggggaaaaaaaatttttttttttttttttcccaccaaaaccttaattttgcattgaattggagagaaatatttacactaggaggtatcccctcaaggattagaatgttcttcctcttttgactacattatttgcgttggtaacagtttttattttccaattaaaaccagaatagaaaacatgtatagaaaaaaaagaatctatgtgcgcttaaaggaaaacatatgtttttccttttatgattaaacatttggacacaagaataatcgatcagcacatgaataataagtcatacaagatgggtccttttcgatttgtccaatcaattgcaagttgattctggaggaaaagaacattaaatagagtaaagaagacgtctccagtattatttccgcttttgctgaatgtatatattcaccaggataacaaaacaatggtagttaatgaaccggtcagttacaccggactaccggagacggttatatatcacggtaagtcgctgtgtatcaattatctggataatttaattcgaagttaaaataactaagaagcaatttatgagtagctaactattgatagtcaggaaaatctcggggttcattttcctatttattttctgaattctccgtaactaatgtttctgaaaatacgtagccgtcagaaccccaaatagagctagagggataaggtggaacaaagcaaagtcaattgacgtatttaccaatggaattttgtgtattcgttgatattccatcatttctttttaattactgtgctaccgtagtactccctccgtcccatatgtcacatccctccaaaatctcttatattatgggatggagggagtagagtattttttttgttgctccaccgttcccaaatataaatatttaatttttgttccaaaatataaggacttgtgagaataaccgtctacagtgcattaacttgtggttgtgtcttaatgactcaactcgatccatagattgctgctaaattaatactatcacttaccaatcaaaagtcaaatatacagagaaagctacccatcggacgtccgatgcccatcaaaaaatcggatggtcaaatgttgcagttgaccaacaagtgaagcat

SEQ ID NO: 50672 - DNA, 686 bp, Oryza sativa
cagggatgggaactaatccctcctgcacggaaaatggaacgatctattagcacatgattaattaagtattagctaaattttattttaaaaatgaattaatttgatttttttaagcaactttcgtatagaaactttttgcaaaaaacacaccatttagtagtttgaaaagcatgcgcgcggaaaacgagagaggagggttgggaaagttggaggccgaacacaccctaagtattctgtaaaggaacattggacatatcatattactgttggaccagactttagatgagtaattttcttgagaaaaatgcattatgatctttccttgaaataatgacaggaccttcgtgcattgacaatgaagaaaggtgttagcttggttctccatggagcatccggactgcctcatgaacttgtaaaggttcgatatactgtttctgtctttaataagattgattaatgaagttttagcctgtactcgatgagtttccagcaattacagaagtttgtttttaccttttttgggtgaaagagggaaatccatcacctatcactccccatgttttctatgttttgtttaatcagtttgtgcatgtgatcgaacatggtataccatattcaaacctagactttctttgttgaagacttgttaatttggagcatcaacgatggagaaaaataagtccttc

SEQ ID NO: 50673 - DNA, 703 bp, Oryza sativa
atgccgtcatgtgcagcagccatcggattgagcagctggctgccatatttccatgctatgcgcacactttcgttcgatcgtaccacacaggattttccttgtcacgtaactatctgcgtacagtggcagggggccaggcagcatcgcatgcacggctagatgccatgccagagcacgtacaccgagtttaacgcgccgcgcccccaccagctaattggcagtggcaccggcgcaacatgggcaagcatctgctgcagcagaggcgcagagcccctggccgctggcacttgccccccgccccgcgtgccacggcgccatatgcgtagctacgcgcgcggccggcctgatcatcaacgcgcgaggcagcaaattcgcgcggcgaacgtggcgcacggctgccgagcagtgattttcccggttgacgagacgaggacgtgaagcggctcgtgcgcgcgcccgggatctccggatggtttcttcacctcgatcgatctcctgctggctctgtggcaggccgtctttttgcctggatatagcacatggccggtctcacagtgcgagctaggatgcgcgcgtgttgactcgtgcgacacctcggagccttgcatacgtgtcgtcgtgggtcgtctccttatttggtcgctcggctctttggtaggaaactggttcctcacctacgctcgaggcaacacgacgcacacgt

SEQ ID NO: 50674 - DNA, 728 bp, Oryza sativa
cgtggctatgtaaatgccttccaaacatgcttattagagtcagagtatttagatgatggtctcggttggccgtggattaaaaaaaaaaagaacagcccaaggcccatattttttttagagagggtattttccatatatgtaaaaagaaacttctggatagagaaaaaagaaaagtcccttattaatatattatattagtgatacgctttgatcaattatgttgttctattgtatatcaccgtgttatatttgtagtatttttaagtgtatatatatgttggatctcctatatccaaaatcctaggtacgtcactgcatatataattcaaatcctcattaatttcttttcaaaaaagaataagagaaacccaatagagatgctgtttcaacttatttttttggcacaatgccacgattcaacatacccgatcacattacaaagtgaaatatactattattacctttttcatgccatgttgtagtatccttgtttcttctctttgctttttttaacgatctacacaagaccatgggaagattcatattgatatagcatgaaaaaatactggaaaaaaaaaggagaaaaagaccattccaccatgtgctagaggctccaaacacttcctggagaagcacactagcaccaagtcgttgttgtgcgtgaccaatctcgctactctacaagaggatcggagacgcttccacctcaaaccaacttcaccaataag

SEQ ID NO: 50675 - DNA, 1153 bp, Oryza sativa
gtatacatgtataccaagtttgtgtacatacgtataaaacctaaaaaatatacttatacaaactttatatacacgtatgtaaactttgcatatacgtatataaagtttgcatatgcatcgtttgtatatgcgtatacaaagtttgtatttatacatgtataacgtattaaaaaaaactaataatgatacggaaagaaaaacagaaaagcaacaaaacaaaaacagaaaccgtaaactacggaaagaaaaaacagaaaaagaaaataaaatcgcaaactacagatacggaaagaaaaacaggaaaaaaaaaagaaaccactcccaaaaaaaaataacgtgggggagggcgcgcgcgactggtcgcggattagctttctcgctcgcgacggcagcgccgcggctgcgtcggcacttcttggcaggtagggatgcaagtggatagccccgctacccgtataaaaatccgttagctagtttattttccatataatagtacaaaatttcagagaaaatataaaatagaagtgagataagcgggctaaaagaacccgcttacccaccccgcttgcatccctattgggcaggtcacggcctggcggctggcattcttcgtttcgctggccagcagagaagggagcagggacgcagccagagccacgcacgatatggtgccgacggcggagagacgaacagccggatggttcgtgaaccgaacagcatcaagataacatattagtacttactaatcagtatggggtatttaggtcttgatgggtatttctttttcttttccttgattaagcacatacttaaaagataattaagatcctattttttcagcttaagatttttgtaatcttaattattaaatcagattactctaagctaaattgagtgctgacattgaataagttgcgagttgtttgtttctctggattattggaggcatttaagggtagagagtctttagccactcaataatctggaaaaagctcctctaaaggagattattggattatactaatctgacttatagattataataatctaacttaataatctacttgtttatttcagcttactcctaataatccagattataataattctaagctgaatcaaacagggcttaagatttgggggcccaactttt

SEQ ID NO: 50676 - DNA, 1071 bp, Oryza sativa
ggggttccaccaacatattttagtctattttggattgagtttagcttgatacgggtgtctaagttggaatcgagcaggtgtatatatagtgaaaattgataatctatagctgaaaaaatttctgaaccgggttcctgggcaccccccttgatacacctagctccgcccctggatggtaggagctcgagataaagtgcggtagcgcgagagcttgggctatggcattatcttgtttctcttgaggagcataatatttataataaattggaaaagtgaagaaaagaactcattgcccgtttaggggagcttctaactactgcagcttctaccaaaagcagaaaatctcctaaacagtccagttttttgttcaaattttgaaaagctgtagttgtagtttctgaactagaaaccagaagctgtaaaacccagcttttccagattctcaaaagctgactatcaattagctgcttcgcagaatcttgatctccccaaacgggccctcagccttaatcactaggtggttggtctctctccttttctttgaaaaatatgatacaagagtattctttacctttttcatggtcaaagtagttcaaattgatggtatcatattcctattttctactctctccgtagcgaatataaggacacgcgagaagaatttgggaaaaattaagctagaaagaaaaaaaagactcaattgcccctcattaaagttccggaatcagttagctacatattggcgtaattaattaaagaccgatttgttcagttaacctaggccttaaaatgtatatttgggaaaatgctttatatcgtacgtacgatgaaaccgaaatatcggacgcgtcatctactgcaaatcggtatatggataggatgaaccatatcactgtaacatccatggccaatcgtttccttttgttcttacctcttctctttaaatattttttcttctaaattacttatcccgatctacgaaccgatcacactggtgtattcgctacaattaaatctttacaacaagatatatatgatatatcatgcaaaagaaaaacatatgttcaaacc

SEQ ID NO: 50677 - DNA, 1151 bp, Oryza sativa
ctttcgccgtcgcatgcctcctccccgcctccttctactgttgtagccgtggccaccatcctccccttcctgccgaatctgggagggagagggagaggaaggggagggaagggccgctccgccaacctcttccgtagccgcaattgctctcgccccagtctacagttggatctgggaggtagggagggaaggggacagctacgctgccaccgtcctcctccctacaatcggatctaggagggagggaggccgctccgcagacttcccccactaatccaaagctattgccaataatcaaagtctatgctttaatgtgatctccttttgtgcactagttgaactaagcatggctaagcatctcctaaaccaacatctagtcattttaatacctaagttatcaatggcgtaagggaaacaacatatagctgagtaataggacccatcccacatgatattgtaaaacaatgcaatatttaatagaaatgcgggacatttgtaaattgggtacaatatgatcaattgcaatgtatgacctgccttgctctcgcactgatggaaccacaacaacgtcttcgagaaaccacgaatcgacgaaacgggcgaaatctacgtgacaaacaaagcacacaagcaaaacgtgctataagactactgaaacaggaaacaaaactatttttaatggattctatacatttttatgaatttacttagacttgaatggacttaatcggagctcggatgaattagttacgatttttagaagattctctgtgtttttactattaaagaaaagccttaatgtatttattgcgcaatattgccccagggatgacgtcagcagggggggaaggcgccggcatgcgggccccatgagtcagcggctcaagagagagagagagggaggggcgccggcacgtggctcgactcggcttcaaagccggcaggccaagcatggcgggcgacggcggcacgcatggtcgccggcgacggcaaccggcggcgcggacggcgacggcagacggcgcgaaaagcggcggcggcgaccgaagacgacggtgcgcgcgcggaggacggcggcgcacacgggagagagggaaagagggaggagggggagtttctcaccgaggttggccggcgcgagtggagacaac

SEQ ID NO: 50678 - DNA, 664 bp, Oryza sativa
caccaccaggaatcaattaacctgtgcaaggggttagtcaaactcaaacagcttgggcgggtcatgatgagatcatgcatccttggtccatggaaatttggccatgcatgcatgtgcaggcttgtaatattctagacacatgcatgcagggatggtcaatgtttttgatagcatatgcagccgaaatgccgaaattaatactatatactctagctagccgagatgggtttttttatgtgctagtattagtagatccacacaaaatatgcatgtaaatcctaaccagatgctcggctaaccacgcagaaagaaaaaaaaaaaaggtagtaactatattaaaaacatgatcctatgtctgcttgttagccgcaatggacacgacgattaaggtaattaattaattccataattcgatgcatgtacaggacgacgacacactacaggggttcaaccgatgaacaaccaaaccatgcgtacttaagcgtcactggtacggggactacgggttactgatcaaatatcatccctagctagcgctacgattcacatgcacaacttaattaatttttttaggaggttttaccatcggttataatacggagctagctagctaataattaaccttcaaatggactgaagcttgctgctgctgctgtcatctgtt

SEQ ID NO: 50679 - DNA, 694 bp, Oryza sativa
gatatggaagaaaaggaatcaacgaatctttcagcacaaggaggctacatcatctttcctcttcgccaagatcaaggaagaggcgcggacttggacgatggcaggagcaaaacgtttgcgggaccttctgcccctccatatataatatataaagagtacaaagtttttcatttctgatccttaagagttgttttttcttccactatattcaatgaaaagtcatgatctagtgccgttttgcttaaaaaacaacatgattgtagttaatagttattactccataaagtgcactttttttaagtgtaaataagtaaataactgatggatataattggaatatcgtcgaacaacgattggccctttttttcttttcattggcgtttagatcgtttgacgtagcgacgtccggggtcgttgcgccattcgatttgcatcggacggaaaagagggagtacagcgatagaaggggctattgctcggtccgcaacaacaaaaatcaagccacgaagattgtcctgggcccatggaaacaatacgacggtagcattgattccgaggagttcctctacatccattctacaagtgcaaccgtatatatcatgtctaacctgaccgtccgtcttatttaaaaaaattatatacttttattattaaaaaatagtcacacataaagaaccattcatgttttatcatg

SEQ ID NO: 50680 - DNA, 977 bp, Oryza sativa
cccccctcccccaccacccctcgcctccattcctgtttctctatattgcaacctttttatttttgttttatttttttggatgttttttcgcacttaggatacgatacaaccagccacaaaaaaaaattaaacttgaacggaatataccacttagctagatatccgaaaatagcataccacttagcctattttacaccttcatcagaattagaccataacttctttagtaaaacctttgatcagcatgttaaatataatacactctaccactatatgaaattacttaatctctaattcaaaatataaccacatgaaatgatagccataagttaaatagtacagagagatgcagtttttttatttttattttattttttgatatttttttcacacttaggagaatacaggaaccaaccatagaaaaaataaacttaaaacggacaaaatatgtgacttgtaaaattttccaaagctctaccgaaatggacaaaatatgtcatttattaaaataggcgtaactttctcatacagactcggaatcaggcaaataatatatccacggacatctacagaaaaagttacatccaattctccctgctttgccgggttcggcgatattagaacctccaaattccgcttgcaagattgtgttttcgaggagagaagtttttcggtagagctttggaaaatttcacaggccacatatttcgtccgtttgagtttattttttatatggttagttcttgtgagttcctaagtgtgaaaaaaatatcaaaaaataaaataaaaataaaaaagttgcacatctctctcctctgcactagttcggagagagagaggagaggagaggaaaaattctacaggtcacatattacgtccatttgagttcattttttctatggttggttcttgtgtgtctctaagcgtgaaaaaaatatcaaacaaataaaacaaaaataaaaaatttcccggggggg

SEQ ID NO: 50681 - DNA, 1901 bp, Oryza sativa
aaatatatgctttagagatcgtattgatgtaataaacgaagtaaaaggatcggagaaaattagagcattataacccaaaatggtcttacagagttatggtacgttatattgaaagagaagtcgtgcataaaaaatacttcataaagcctttgttggaaacacacttctcaatgtgtttgaatgaccccgcaaaagcagtcgcaataagaacattggtcaacatatgcctcttaagagctacaataagataataagcgagttatatatgttatcatattatatttatacttatgtggaagaaagataagaaatgatggctacagatttgtaaccatctgcagcaaagtctccaacaaactactccctccgtcgaaaaaagaaaaatcaaccttaggttgaggtttttttttaagacgcaggagtgtatgaaagagatgggtggattagatattaatgatgtaatatatatatctataattaactattgtatgagtggactattaggttgattatagatgatgttttaatttttgaagccaaaagttggctatattattaaacttcgatgcaacttctatattattaaacaaagccatgggttaatatagtagtaatttttaaagcaacttctatgcggttcgagaaatgtgcatatagaaaactatgcacatttctcctatacaatgttttttttcctgaggaaacatgcagggagttcctacaattctttatagaagaagaaaattgatccagtactcctatacaatgttcaaaacattgcctcctttgaaatggagtactattttcaatgaaatatcaaaagattaagggtgtgtttaggcttcgttcgttcctgggcaatctgggggattgagagaaaaaagcatctcgttttccgcgcgcacgcttcccaaactgctaaacggtgcgttttttacaaaaaaatttctataggaaagttgctttaaaaaatcatattaatccatttttgaagtttaaaatagttaatactcaattaatcatgtgctaatggctcatctcgttttgcgtatcttcccaatctccccaatccccttctccttaaacatgcccttagttcacgtcaaaattaaaagtttggttgaaattagaacgatgtgacagaaaagttgaaagtttgtgtgtgtagaaaagttggaagtttgaagaaaaagttgggaactaaggccctgtttagatgggactaaaacttttaagtccctatcacatcggatgtttgaatattaattataaatattaaacgtagactattaataaaacccatctataatcctggactaattcgcgagacgaatctattgagcctaactaatccatgattagcctatgtgatgctacagtaaacattctctaattatggattaattaggcttaaaaaatttgtctcgtgaattagctttcatttatgtaattagttttgtaagtagtctatatttaatactctaaattagtgtctaaagatagagactaaagttaagtccatgatcaaacaccacctaaaccagcgtaaaagagaagaaaatgggcgtaaagccctgttccactagagtctgccatccatttgacctcaacacagtttttgcttgtacggaacgtatctttgtcacgggttcatgtccacagtccacctgcttcatctaaaaaaaagttactgtcagctcgatggtttaagttaccatctagagtagaccccacagcgctatttgctcccattgagtcgattattactacggaaatctttacaaaacgcatatgaaggctgtgtttagttggggaaaaaaatttttgggtgtcacatcagacgtttgaccggatgtcggaagaggttttcggacacgaatgaaaaaactaatttcagaact

SEQ ID NO: 50682 - DNA, 713 bp, Oryza sativa
atatgggttgtttggggaactcaagattttgagacaaaagctgcagtagttagaaactccccggccccaaacatgaccttcataggggtataaatatagctgttgaccttcatctcatgagattttgtataccccgttcttttttaacggcatcatatattgttaccacgaattagttgctccggctctaaaaatattttctcatagtttatttctaccacattgcttatatcatttgctctaagcatttgataagtttatatgtcttaaaatatttaatttatccctactaagtatataatccacaacaaaataattcttcgtgaagtaatatttttcaaactcatggacttgatttgtatagggtatattttaatttgaaagtcatgaagattaaatttcaaccattgatttcttataggctgcgtgtgttcctaattaattatactgtatagttgcaaaacgaaatgttgcacgaaagcactttaaacagaatatgaatctatttatatatcttaatttaatgcactaattaaatagacatgtaatttgactcgtcattagtaaaaaatattaattaaacttaaaatttcagattaaaagacagtaaaaatcaacggaggcatgtaatcgtggttactgctcccaaaccatttcatcgtcgcccgtcattgtctatatatcttgatttcaagttttcaacttgttagtgt

SEQ ID NO: 50683 - DNA, 1423 bp, Oryza sativa
cgaagaaggagcgatgcattctgggacgtcatcatcatctttagagtttcatgcggtcaagccgaataatgtcacgtgagttgttactggttgtgacagttatatcttgttaaggttctatgatccgatgtaggttgagagagatatatatatatatattattactactacggagtgataggtttagcggagtaaataagtgtgaactgtcatatgtggttctcttagtgatctggggtgctctgctttgaactcgggagttcagaagtataatgttcttttatacttcgttgcagtgtctatgattactccgtacttttatgattactccgtactttaatggtgtgtttggctaatacgaaatggggggtgtgattaggattgaaaaatgaatgataggtaaggattaaatggaagatgatgaatggatggctaggatatttaaaatgtcttttaatgtgtaggaaattatttttctatcctgtttagttccaaaatatttcttcaatcttccaactttttcatcacatcaaatcttttctacacacataaactttcaacttttctgtcacatcgctctaatttcaaccaaactttcaattttgacatgaacacacagggcctaaaaagtagtatgtcagaaacacgcagtaaatgcatgatgcttttgccattatcgggatatggattttcatccctcgaagggatatcccgtcgttacacacgcaataaatgcatgatgcttttgctattatcgggatatggattttcatcccttgaagggatatcccgccgttgtgttaccaattttttttaaaaaaaattgacataatagattaatatgaaatatatcaccccacaaatacaagaccaaatttgatttctacaagttgtaaaaaaagaaaaaaataaattaaaaatagttaaaatatttttctaaagtgttgtacttcaaattaaactatcttaaaaaattctttataaatatttatatgacatgcacaaaaacgagaagatatagagggataaaatcgctttcccctattatggcttcgtacctaccgtaatcagatgaaggcagaacgtcaactggaacaaaaaaaaactagaatattagagaaggatctaatatcaaataattaggaggggtgaggctttgaacccaggtcgtctagcccactaccttgtggagctagccagaaaacctctgggcatttctcacgtcaaccggaaccagatgaaagcaaaacaccaggttctcggtctctcttctgcactcttctctctttttctggctagcgctggccttcaatccgatcagccatctcacccagtgggcagtggaatatggaaaatttttacaccgcgcccagagctcagagcaagaccttccagaggaataagaagaggagggaaggaggca

SEQ ID NO: 50684 - DNA, 1064 bp, Oryza sativa
tgggttaattccgcccctcatttttctaggtcattacaacctgctccactctctttttcagtacagctaaaactattttgttaagcttcagctatagaatagctggagctgaaattctgctaaactgacgactacatgttgtatcactcaccccttatttatttatttttcatgtcttacttctaaccattatctcatgttccaaccatatttcatttaatgagggctattataatttctcactccatccttgatttctctagaaaaagagctgggatattttatatttgtgaaggaagtacaattgccccctcccccgattcacaagatatgaagataacatgaaacataaaaacggaggaattgaagtggtcgattggcttgatgctgcatggtgatggtagccgcgaagcctgctgctcatattttaattgaatttttttctccttaataattttgagttttcttccattggatatttgaatacatataggggtgatgttgttgcaaaaggctagaatctagatatgtaagtctatggatccagatagtttaactggacttattttaatttttgatgtaaatttgatcggttctactataagtctccctttattgcattgcaaagagcagtacagtcggagcttatgtaagatgaatttcatttaccgggcttaattcttgttctaccacatttatctgaattgtgataaatggaccaataggctagccggtaaccggccagcttgagaaaagtagatagattagggttaaggctgtgtttagttcgtgtgcccaaaatttgtttgaattatacggacacacatttgaagtattaaacgtagactaataataaaacaaattacagattatgcctgtaaaccgcgagacgaatttattaagcctaattaatccatcattagcaaatgtttactgtagcatcatattgtaaaatcatggcgtaattaggctcaaaagattcgtctcacatttacatgcaaactgtgcattgatttttttcgttcacatttaatgctctatacatatgtccaaacacgtaatgt

SEQ ID NO: 50685 - DNA, 2580 bp, Oryza sativa
atgccagaaactatgtcatatcttagaacaattagatattagaattaaattaaattcatattacagagagcagaaattggtactagaattgttatgttgttagcattattatgttactctatattacagattgtttctgcattttctcagcactcaagtggaaaataagttggaaattcatgcatcgttttgtaattttaataaatttctaaactaataaataacccatggagatctttctcatacattgtagtgctgtcgaaactcaagtatggttgaattggtaccatgattaatcgtagcttcatgcactttcttttattttggcaatggtctctttgcgtactcttctattcatgcaatgacatgagcattgaattctgaaactgaactggcattattttgaagaaataaaaaaaaacccaatcatgttatcttattaggcaacaagatcagtgatcatgctcaagttgataaggaaccatattattaaatgtttaattttgattattttcctggtactgaagtactgtctaatttgacctctttgaagtacttgacatttgaattttttctaactttgccatgaagattttgtaaggttgctttttattatacctgtacagttagatgcagtatttaaccaatctaagtaggcgtttttgtgtattcttttaatatataatttttttcttttcaaaaatgcggaagaaacacaaattggaattgcaaaatttaacgctgacaaagcatccattcaaggcattccttttttttttagagaatctcttatatgccactagaaattggctagttctcttatatgccactcaaaattggcttctcccttatacaccactagttcaagtttttccacccttttattctactcccagcactatagcatttgttgatggttagtcaaatgttagttttttcataaatgaccaatatgccctctcaactaaaaaaaatgtgtaaacttcaaaaaaatcataactaatttattttaaatcctttttgagtgaacaaagttttgtcagaaccggtggaaaatgctctttgtattaaaaatatgggtaatttggaaccatgccattataattttgcaaagtttgagatatgtcatcggtatctcaatgacatgtaggacccacatgagtcaatgacatgtgggtcaggatggcatatctcaaattttacaaaattataatggcatggtttcaattttccctaaaagtattgttggaaagctgcatgtttcatacttatattgaaagtttatttgtgatggtgatgtctaaaattgcatgtgattgaaaaaaaatcaattttcatatgttgtatccagtagatatattagtacgaaaatacctatcattggttgtataccaactctcaatggtaaatgcgtctttttactatgaagttaacgatcaattgacggtggagtgacagcaatggcataaaagggaggacaaacttgaaccggtggcatagaaaggaggagccaatttgaaagggcatataagggaaccggttaatttggagtggcatataagggattctctctctttttttcatgttagcaatggtgtaattaatactcacctgccaaatacataaattccatgccaatggttctactgagtcctttttcttgctcttgttcaagaacaatttatgttcctcttctgatcttaagtcccaacgtctattaatttatttctttaggtttctggttcaatgttttaagaaaaaggaaaaagtacgaaatacccccccgaactatagcggtcgtctgaaatacgcccctaaaaacgaaaaccggatataattcaccctcaactatcaaaaccggttacttaaccccctaaggcagaattatgggcggttttgaccggtcttcgtacacgtggcagtacagtgtggcaaggggacggcacgtcagcacggggtcactatataacagcggagcgttctctctctctctctctttctctctctctctcgcaaaatttcccctttctccccgaaaccctagaatgggcggcgattccggtgactccggcgaggctggctgcggcggggctgggcggcgctctaggcgggcgggggtggcgcgctccaaggtggccacggcgacgaggccggcgagctccactgcgaccacggtggcgcattgcaaggcggctgggatcaactaggctggaagaaaccgggcatttgaggtatgtgatttagctcgatttgaagtgtggattttttggtgaagtagttgtagtgtgggatggattgatatttttttgagcagttcttgctagatattagtcagatgcgttgggattgttattatagtgcagaaaggtggagtaagtgggaatatgggggaggttgattttcgtgttgggattgtaggtgcatgcatagggattgattttgttcattttatagtaaaggtggaagtatggtggttgttttttaactgtcatcttaggggacatatgcattgggattgattttttagtcttaactttttttaggacaattttaccatcactgcaatggatcctctagagt

SEQ ID NO: 50686 - DNA, 5662 bp, Oryza sativa
gagagagaagcgaggagagagagagggatgagatgtggggagaaatggtgggaggcggcctttcgcgtggcggaccgccgcccgcacgagccagcccctgggccacgcgagccgctgacaggtggggccgggaggggtgggcccgggccggccgtgtggagggtagcaccgcacgcgcgtacgcggagcggggcaggggtggtctctccggtgatggggaaattattctgtcaacttgggtcgcgtgggtgggtggacccggtccattggagatacgtagcgtggggcccggtggcagtgggtggtggtgcagtggaccagtcgcgggagcggtttgacactcgggggggagggtgcgcttttgggttccgtcttggcgtccacaaatggggagggggaggggaacgagggcgaggttgctgttgcggccaagtgatgcctttcggatacggcgcggcgcacacgagcgcgcacgaaatttccgacccaacggtaccgttttgcatttctactgtcttttttaatttattatatttgttttgtgttcatgctgtactccctccgtcccacgtaatataagcgatgcgacacatcttagacactctgtcgtgtatcgcatcgatggagggagtatctacgacgtcaataaataattaaattggtaaatcttgaaagttttttgacagaccaagaaatattctcttagaaagtgatatccttctcaaccatttttttccttagccgcacctcccaaccgtaggaatagtgaaaatcttataaatagttattaattactcatataaataggagtatatgatgaagttggatttttaataaaagttcgaccattcaacttattcaatttttgtgtgcaaacatataaaaatgtaacttatgtttaaagactgtatgatgataaattaagtcataaaaataaataataattatatatatatttaaataagacaaatggtcaaacgtataaaaaaatcaataatatcaaatattaattaatggagagagtactagtaattaatggatttcaatgaaatcctcaaaaagaatgtatattcaggtcgtttttccttttcattaatcatcctaaagatttttctttcattcagaaattcggtacgcatgcgtgtgcttctttcttcaaatcaaccaacgaaagagcattgtgttgtttttttggaagtattgaggctataaatcaaagaaacaaaggattctggttgaagttagttattcccgtgttttttttcttttgtctagtgtgatactacttgccagaatgaaattgaatgtgatttctcctaaatctacaaatttaaacttttaagttcactaaacataacttggtgtttttgaatcctccttagctctggacctatgccttgcaggattcgtggctaacaaaattttttagcaccggagggtttatgagggtccggttccaaagtaaataaaaaataccaaattatttaaattggggttcaacgcgagtttagttgtagagtccatgaagaaaggacgagagaggaagagaaaggtggtcatatgaattcgtagggaacatctcttcgtattattgtattcggaagtaagaataattgaattattcagtacgaagttacgctgaatcaggacacgtaacagggttgacttcaagataatagaaaaagaaaagaaaagagagaccgagatgccaaatgatcaacagctgatgacgatgtgctgatgcacatcatatcggtgtctcagattatgagactatatctatatgagactctcttccggggaaaaaagaagtggtatgaggatgtttatttattcacacagccgagtcgccctttgcatgaacgacaggacgttgcgtttgctgctcactggtgcacattgactagttaaccggggttttttcttaaacaaagaacatagtacaaatgcacgcacccacaacgcctgcacactcacctacccctatgagcacctccgaagactagaccagcatattttgaaattgacgaagtcaccacaggtgcctcgctgccaagaaatacgtcgcctaccactgaaagaataattagccataaatgcgagcacccatgtcaaatctagaatttgctccaccacaagaaaccgaactagttgagctacactcacttcgctagttaactggtttttacaaaaggaagatacgaattacctccgtgagctatcgccgtcagccgaattacacccctgaactcgaataccaaatattttacacccttgactattgaaaccggataaataaacctccgacttaatccagagtggttttggtcctacgtaccatacgcatggcactcgaattgaggttgtgacctcctccgttcaatgctgtagtggggcggcctcccttgtccaccatggccggcgaggtgaggtgggacaacgaccagtatgaccgcatcaccgccatctagattgatagctgcaacctcctcccgaccaccaccgcggagccacgtggcgagggaagccgaggatgaggtgagtgcctggaggccgccgagttcagggaggacggggagaagcggtggaggttggggacgagacatgtgatggccaccaatctcggggaggatggaagtggcagcaatggcgatcggggaggagggcaaggttgagaaaatttcgctgaggaagctcaagacgacggctggctcgtcgcttacttctcacaagctccggctccgctgccgttgcagtcgcctccgtgcaagctccggttccaccaccctccccaagcaactttgagctccgccactggccgccgcctccattgccttcaccgagctcggttgatgtcggtcgccgcctctacggtccttagcaaggggatggatctgggataagagaaggggagattgaggaagacaaaatggagagaggtgggatggagagatctaacagtgagccccaccgatattttttaaagaattgtttattagactgtcacacgtatgtcacgtaggaccaaaaccactctatattgagtggtgggttattcgtccagtctcaacagttgagggtgtaaaatatctggttttcgagttcagggtaatttgatcgaccatgatagtcacttttccctttctaaaaagcactccacataaaaaaaggacatattgaccaactaaactgtcatggttatggataccacatacctaatagtagttgactaaactcggcagggcccaccacataccatgtcttatacggaaacaaaccaacggtgaaaataaattaaataaataaatccctccattaaaaaacatatgttcgttcaaaataaattaaataaataacccctccattaaaaagcatactctcataatataaggctgtcaacgggagatactcatataccggatagtatgggtattggagtacgttggtgcaaggatctatacgattcgacatcaagcaaacaaagagacaaggattataccggttcaggcccctcgtaaggtaatagccctaatccaatttatatgagattgatatggaaatccacagagtacaatagaataactgatttcgagattactagcgagatccttgtcgagatagcctcgacgagatctaccagcgagtaggcttcaagtctcatccggattgcttctgtggtggcagattggctggtgttatgattcgatgccttggatctcttagggggtatgtatttatactgtgaatccccttagtctccaagtagaactcggagaccccagaccatgcatgatatggtataattctaacctctccgagtagaactctgttacgtacttgcccgtgaggattatttccataatctcttgtcgatttccttatcgtatacggaaatatatcacacatgcgaaggtatgccgtatccgtatattccataagtcacaggatagaaggtatgtcttatccgtaaccatgacaaagatgatttgactttttttcttagttaaatcttttttatgtttgataagtttatagaaatacatagtaacatttcaacaccaaacaatatgctatcaaaatatataatattaggtttagtgaaactaatttggtgtcataagagttgctacatttctttataaatcagatcaaacttataaaagtttgacttcttataatatgaaacagatggagtaagacgtgttttgcttcattgggataaggttttgatcaaactagcttttacataaaaatgcttgtcgaaatgacatgtattttagactggatgggagtagatattaatatgtaagttttaaatttgtacataataagtttcagagtcaaattgataaagcaaagattttgaataataaacttcctagaaacaccgaatcaaagcccacgtaggcggtatagcactcaatgtgcaatcacacaagtacactacggattgtgagccgccactaccaccaaacgcccaagcaaaaggtcccgtgtggcagggtttctggttggtaggagtagatgataaccgttatcatgttatctaaacaagactatatattatataatcctacgatgggattgactattgagttgtatgcacattgttttgtgatcaagtgtaaatagtatcttttgtgttctaaattgagaagtacatggattagcagttgtgaatggcagtacaattttgtacgccgatgaaaagagtagctaggaccaggagcatgaaatcatgaaccttggatacaaccactaaaccacacatgcacagccatgcctaatagcaccaatgagcaaggatgtatatcaaggctcacaaaacgacctgcaaaacaattgtctgtagggcatattttttacgtttgagacatgttcaaacatgtctacttttatatttgggagcacatttactatttctggatacatatttatagccacaggtttagatctcagacttccagtgaaaatatgtttactggttcgaatgatgtacatatccatatagccatattaatgaacactaggatttagatcttggtggataaagcaaccatgactctaccaccatagaccatgccaacgaggcaattacccttttaaggcaagttcttagctaaggtttctaactctcttctctcattctacgtgcacgctttttaaactactaaacgatgtatttttttaaaaaaaaatctatacgaaaattgctttaaaaaatcatattaatccattttttaaaaattagctaatacttaattaatgagtcactatgtttgaagtgcgtaagttcccaatactaccaaccgaacacagcataagagtgtattaccaccagaccaacttagaattatgttatattcttggctgtgattactaattcattattcctataccagaaatgaggggaacagaatcttcagtcacattccaatttatatcccattgctgttctttcggaggtaacatttatacatgctagaaaaagaattaactagaaaatcagtgcgcctatatttatagccaagtaaattgcatcaccgatacacgaacttcacaggtgggtgcaatctagtacacaaacttgtaaaatgctcgttttggtgcatgaacttatctggtgcgtgcgaataaagacgaaaaggatactatatggcta

SEQ ID NO: 50687 - DNA, 717 bp, Oryza sativa
atgaacagaggaagtaccagagtctggaacagcatgaagaagcatacatttcatttacattcatattttacattaagaatgcgctaactgctcataataaaaaaattctcttaaaaatgataatatcgatataaggctcaatatcaagttggcaacacagtgatatggatgaggtacacacaagaacatgaattgtaaactttaggaagagactaattggtcaacagtaaatacaagaagttgagtttaatcaagaatttaaaaatagtctgaatagggcatgatctgagaagtaatctttaacaaaattctaaaatggcatatgagtactatcagggtgtattaattgcaatgccaatgagtatacaagtttatggggtaaaatatataggttaattgtttgaaagtaaataaaaacgacatacatatgttttaaaagatatattacagtaaaagcattaaacttgactatcaaaagcatatcgcctgcacatttaattcttcacatggaaatctttcagttcactgcaaactagtcatggaaggaagcattgtaactgaaaaacttacttttttttttttgccaaacatactgagaacaatttttgaatccattgtcaaaccccttcggagcacaacccaaacacgatcatatgttatcatattagtcaggtaggtagcacagaaggaccatcgcttcgatgaatttccacatgt

SEQ ID NO: 50688 - DNA, 3258 bp, Oryza sativa
  unsure (1)..(3258): unsure at all n locations
aacacttgcatatggagctttggaaatgtcctccatgcttgaacacatgtcacccctgacttcctccaaaagtggaccgaaaaatgatgtcatgtactgctccatgctgctgaatgtttctgggatcttagccacctgcgacgacacatacattccatgaatccacagcctctttttatggcaataggcaaaatgagttcacagaggagttaagcaacataagagcagtcatgctaattccttagttccattcttagtgtagttaacattttgatttatggcatttcaactgcaatcattctactctggctaaaaagggggtgtaggttgtctccatagcactacacaagcagaaggtaaatctgaaatctactccagccatctaggtaagtacaattcagatactaccagacaaagcataaacagtgaatcacttggcacagattcaaaaaaaaagggctagtgcttctagtgtgctctaccagaaactggaaagcacaaactccaaagcgcaccagtggtacgatttgcagcgccacccattatttcactaataataagcacaataaacttcaacaagcgcatcagtggtacgattgcagatttgcagccacccaatacttcgcttattacgcgcaattaccggttctacacaaaattaaccactcattcgcgatgcgtgaacccaaaaatggccccatcacaagagagggaaaaaaaaaacggccccaagtcccacccaatcgatgacgcgaaattgacacgcatttcgtcagatccacgccgctcaatggccactcacgcgagtgccaccggtgcgaattcgagaggaagaggaggaggaggaggaggctgcggatgtcgcgagccagcggaggtggtggcgtcaccttgtcgcggagcaggtccttgttgaggatttggtccaccgaccacgagagcaccacctcggacagcccctggctccgccactgccacagcgagtcccccgacgacgacgacgacgacgaccccttccccgcccccgccttcatcgccgcctggtgccacccgccgccgccgtcatcgtcgtcgccgtccctgccgccgtcgaacgcgtgggaggaggagggctccgcgggatccgcctcgcgcccccagtctccgccgccgcggcgccgcatttcgccggcgaccgggagaggaaggaatcgccgcctcgcgattggtgggtcagatttgggggctaaattggagtaggttttagtggatttttttttgtttggtggatttttttatcctattggagtataataaagtatggatcgatctgtccccctgcacggctgcatccaacggttgggcggccgtgattcggacaggctagctagctccagtgacgcgtagtaccggcacaagctcagctcagctcagctcagccggtttggtcggctactcggctgagttcgttccttgcagttgggaaataacctaccgtacaagaagcacctaattaatcaagtattaactttcttttaacagtttaactatttaaaaaacgagaaacgcccagaggtcttccagctagctcaataagatggtgggctagacgacctgggtttgaagtctcaccccttataattttttaatattagatccttccctgatattcgtgttttactatttgaaaaacatgcatgtaaaaaaaaagatgagctgggaaactcagctgccaaacacagacttgaattgagatcacaaacacatggcagtataaatgcaacttttgcattcatataggagcaagtgtaataggattattacatcagtcgatgatagcaattgccaagttagatttttgtcgagatggaagagagagaacttaagaagagagatgtgtgggtgactaagagcaaaaataataacgagctataaactgactataaatttatacgaaatagtgaaacaaccaaaaataaaaggtgttggctctaatgcaaaatctagctaacacgtgcttcaggacaaatactttaaatacagtaggtgagagagatagtgagaagaaaatatagaaacaataatatagttaatttattatatatatattggttttaagatggactaatagcgggtagtgaactctactactccaacgcattcaacgcagcaatgtgggcccaacgaataggaacaaggaagaaagcataggagagagattaacatgagtaaaataaaaattttgatcgtgctattgcagttagctattatagtagtaccttagagacggtaaattatctctatctgatgcggatgaaaattatagcctgctgcttacttcattattaatcttgctctaaccatcattagattgaataacaaagattcagatcgcacaagagtattgttcatcatattaccgtatgtacatgttgaataggggtagcagcgccggggggtctccaatctggcagtggatcccacatgccaatatctaccttcttcttcccttctctttctccacagtccacatctttccccttccccatccccacccacccgacggccctcttcccaaccagtgcatgaggaggcggcggctcaaggctagggggcgagtggatggggagccggcggcgccactgctgtttcacgcgacgatggccgacgctagacgactacgagcacatgaggcgatgacgggatcaactccttgctagcctccctcaccgtcgcgccctccctcccttgccgtcgatggtgcacaccggctccgtcgccctccttgtcgagttgcgccgatggccgacgttgaagaaggaaggcgacagcggccagcagaggtggcggcggctggcaggggaggcgatggccggcagggccagcaaacagcagcgagccaccgagccggcgggcagcaatgaacgacgacggatacgaggagtgagactgtgaanaaagcagnatgtggcgcccgttccgtcgtggcgcctggcgggaggactattcttaaaaaccctatttgcgaaagctgtttctttgcttgtggtctagtgtccgtgccatctcagatctcaaatccccgatctatcatcgaattcaatcccgaatccaaatccttccaaattaatccctccgcaaaagtctatttcgcctcccccgggttcgatgggccgaatccctctcggcccatctcccttcccgtctctctctctctctctccctcgctctgcccgcgcgtgcccgaaccacgccgagcgcctcctccctcccgtcgct

SEQ ID NO: 50689 - DNA, 1921 bp, Oryza sativa
tcaaggaggagaccctctccttcaagcctgcagactgcagctccctcacctgatgaatgaacgaacggctgccgcttctttctggaagcacctcctgcattagctttgctgttcagttcaagcatcaatatatatgtcaggtgtttgtgtgtgtgtgttgccagaataacgcagctaggtggcatggcatgtgctgcggcatatgttgtgctctgctccttagtgtccagcattttccttcctgaacctatgtgcttgtatcagtttcatgtcaatgcaaataatacccagtgctgatctggagttcgttttcattccccgttgaaatggttcatcatatagatcattgtggcagaaataatgtcctaatataatgtcatgtggttttgtataagttaccataccggtacagtagagggcacacagaaacatgacttcgtacctcaaactcaattggcacattttaacagcttcagaatccaactgcttattctgctcaaccataacacccagaaagaccttcaaaatcaagcaggtcaagcatacaaatggttttaaaaaaaagttgaaacataattgtaagacatatctgttcacagcatattcgcatattgtcaggagactttgttaagatatttaaccatgcaatactgaacggctagaacaaatatgacaagtggaaatcttaacagtaatatgaggatacgtttgacaatgccaccttgaattctctgacaaacttcttccacagaaagccgcttcacactgcccaacttgtgctaattaatcaagtaaatgtagtcaactagacaaatggaagtagtcaactagacaaatggaactaacaattttaacacaaggattgtgaagcagtcatggatgtacactgtagtttatctctgttgacattctcatgaggacatcagacctaaagtttttttaaaaaaaaaaaaactaaagaagaggcaatgcaaaacagggtttaatgagtttatcctttcttgctctgagaaattcccctttcaacaagactcaaaagaagaacaatatatgaacagtatagtgctgcaggtttaacaaaatggaaagaaagttgatcaattttaatcataaatactatcaaatgtgcaaaaggagcatggtaactcaaacataaggatctaaaaatttggttaacagattcactgaataagagtgccaataaaatatgccatgcttgcgattaacacttactgtaccatacaattgcacagattaaagtggcaaacaatcagccttaagagaagtgagttccactaacagatatgctcagagggacagccttggcccatagaagttttattttcactggtttgtagtttgaaaaatgaaaacacagactactctaatggtctaataaaccaacaacaagcccacacaatttgtccttctctataggagatgttccagaacttccatctaaagttgattaacagtttgtaaagaaaaccaactcacagggtgtgcaatgaagtgtgaaatactaaacgaagctaacaaaatgtcacagttccaattgcacagaaagtatcaatgtgactaagcatagagctatagtataatgcattgaaacaacatttgcatttttggcataatcttctttctgtcattgtatttgtaaatttctaactgtgtgctcaactatacatgatgcatctgtgacctgtatgcaagtattagatatagctagagaatcacacagatattacatcttactcaatcactatccttatgcagcatagttattgctatgaagtgatgcaattgtgcccattggtagaacaactatgttgaaaaaggatagtagtacagttaagcttcaattttgcattttatatacatcctagacttatacaagccagaaatttgaatgttcagtgga

SEQ ID NO: 50690 - DNA, 760 bp, Oryza sativa
tcgtgattgaattgaataaattaatgatcaagcagcaggtgaacactaggtgacaaacatcacaagcctaatggcacataattagcaagcacttaaaatcagaacatgcaagtatgcacatcacatattcccctactgatgatctccactgatagatctagatctcactccattttagcttatttatgtctagcacaatttcccattctcaaaaacagaaaaatgtgccagacaattgcaatcaatatacccattggtgcctccttttcggtaggattataactagagatgggtacaatagttctatgaaacggacagcagcggaccaggtttctccaaaataagagttggccccatctctaacattttttttcagatcaaattcgccgaacatttttgcagtagtttcagaaaggctctcagaaaatgggtgacatgttgggcccgatctatatactaagatgcctatcaagacaatgacacttttgtttagagtggttaatattttttgtcaatctgacgcagcatgttggattactttattccaaatggcgccatttgattgcaacagcgaggcaaaagcagtccacctctcactctcttcttcttcctttttctgcagagattaattgtacccttttttgtgtgctggctttctggatgttctattgttcttcccgtggcaattcctccgagttttagatcctactgtctcaccagaaagcaattaatatcgtgtgtacatttctttttttatata

SEQ ID NO: 50691 - DNA, 924 bp, Oryza sativa
gtgccgatggtgaggttcgccatgtagagcggctgggaccagtagatcggcacgacgccgccgccgcctcctgccaccgccgcgtcggcgaggaggcggccgcgcatgttggcacgctctacacctcgccggaggccgccgccgtgcgcgcgcgcgagcgaacacgccgccgagcacatcacgagcactagtgttgccactagccttcccatgattattatgactactgttagttagctaatgagaggattagtgaccgtgattatcttcctcttccccaaatcacactatacaaatcgagactcgaggcatgggcttatataagaacaaggagtccaggactaaggccctgtttggggagcttcttctgctagaaactgccccaaacagtccacagcttctgagaatatgtagttacatattctgaaaaataaactaagaagccaaaagctggagaatctgggttttagtgcttttccagattctcagaaactggctaccaaatatctgcttctcagaatttaaagctccccaaataggctctaagtcaccatgagtcagggttcacgaaactgatgggtttaaccttaaactgatcaatttttatgagatcgctggttatcagtttgtcgttattagcatgtttttataccgtactgattgaaagtcgtcaatttttttaggttttcgataaaccaatgaaaaacgattttcactttgtaaacgaaaaggtaaaccttctcaagaggcattaacactgtaattacgagccacttgagccttcatggtgtcatcctctccatttcaatattcattgacgttcatggagctaccttggatattcctcagaaaccagcgaaactgcgtgccattgagacgaaattaagcttcaactctgcacatatctatcgttcaaccgtcact

SEQ ID NO: 50692 - DNA, 1832 bp, Oryza sativa
tgctcgcgttccagggcggcgccgagatgacggtgccggtgtcgagctacctgttcgacgccgggaacgacacggcgtgcgtagcgatcctgggctcgccggcgctgggcggcgtgagcatcctgggaagcttgcagcaggtgaacatccatctcctcttcgacctcgacaaggagacgctctccttcgagcctgcagattgcagtgctctatcctaaattcctaatggtatttcttcaagcagttcatgctgcaaataatacgtgaacctacgagtttgtaccgttgtacacttgtactacgtatcctagcttcctaggcaatatgatgtcagcttaatgttactgcaaataatatgtatatcatggtactaccagtagcgtatcaaggatttagggtataggtggttgaagcatccgcgtcaacagtacaccatcaaatttttaaaaaattaattaagaaaaaagtaaaaacgacttataatataaaatggagtttaagtttgtaaaatcaaataagtttataagattaagaacagaattttcaagacatatctgcacgtacgttatttatattttcaaactaaagtattttaaagtcgttgatattcaaacattgaaaatgtttgaccagcttttattcaaaatatcaaatatttataaccgtgtgagcatcatgtacgatcctataggctgacaaggatcctatatacgagctcggttgaccggctagttcaaatttattacagcggatacaatagcagattataagccaactataaatatattttaaggagataaaagaggagagaggagagcagtgagctatagatttatagccagctataacacggactccaagatacatgtgtgtatgataggttggaccatgtattaattgtatacttatatgtttatagtacctattgtataaactagctattagattgactataaataatttaaacaatagttggctaaactgctaagcttgctcttactcatcaattcatggcatcgtctcgataatactaccacttaccacgcgtaaatgcgtaatagatggcttgaccatggccgtggcgtggcagcaagaagccgctaccatgtctaccacaccgttggttggaaaaaaatattactcccaccatctcataatataatataagatatggttaaacttaaacttggtacagtcttcaaaactaatctttgacttataatttttcatgtactataaggtttattgcaacaaaattataattgacttaaagtaaatttaaatgtcaatataatgatattaagtttagcaaataaaatttaatttatattacaatatatagcgcccgttccgtcgtggcgcctagcgggaaaatttaattcttaaaaaaccctaattacgaaatttgtttctttgcttgttgtcagtctccgcgccaatctctgatcttgaattccctacccatcgtcgaattcaaattccgaatccaaatctttctaaattcaaattcctccgcaaaagtctagtttgcctccctcaggttcggtgggccaattcccctctcggcccatctctctctctctctctctcacacagccttcccctcgctctgcccgtgcgccgcacgcgcgtgcgcgtgcgcgtgagccgacgccgagccgagcgctctccccctctctcgttctctctctccgctccatccctggcaagctccccgccgcgttttcgagttccccgcacaccgttgcctcgcgcgcgcgcccgccggtgccgcccgtgccgcgcctgcgccgcctagccgctgctctaccgcgccctgccccgcgagccag

SEQ ID NO: 50693 - DNA, 5281 bp, Oryza sativa
tgtttttttaaaaataattctatagaaaagttgctttaaaaaatcatattaatctatttttagagtttaaaatagttaatactcaattaatcatgtgctaatggctcactttattttgcgtatcttcccaatcttctcctatttccttatcttaaacacagcagacccgaaaaaagtcaacctagacatggatgggatatattttagaccaacgaatctgaacataagcataagcatgtttaggttggattttttattggacggatggagtactataggttatcaatgttagtttagttcaaatttaattatttattggagctcacacgtcacacgaggtccattctatgagctggatattctagagttctacgttgtacaagtctgaacaacttcttcttcctaaattaatttatattttctgcggagaatgcaaacttgtaaaggtgttgtgtcatttcgagaaggagagaataagggaagataacctaatcggaattattataaggtatttttccactttgggactaatggaattcatgctccaaacgcaagtgtcttcttactccaattctagaaagaaaaccatggaagtttctattgtggcctagtggtggcatttgtgggctattagtttgttattcatatattactaaatcataggcaatctaaaatagttatagtaatgtatattttaagataatgaaatttatttcagaccttgtttccaagaaattatagttaattattacagtgtttgcaacttgaaagactatgcattgccattacatatcacaatttgatactctctccgtctcataacatagtaacctactattgaagaagacacatactaagaatatgaatctgaacatgatgttgttctaggaaataggatatgttctattcagttcaagattgttatattttaagacggaaattagataaaaaaaattaatcggaacatcaccctaaagacagagacagcgttatctatagttggcgaaaaatctacaatttgcttgtatgtaatccttgttctcatcaaacctgaaaacaaactcctcgaaatcaatgcctgattgttcccgccgattggaactttgctagcaacatcgaaccgaaatgaaagatatcatcggcgattaactgtattgcaaatcaaccgctcgcctaaaaatacctgcaaaacgtgcagaatatagtcttgcccttctgaaaaacacaattttcacatgttccctccagaattacctttgggattttcttttacaagaacactgcagcctctagagttgatttaccttgtttgctttacttcgttcttcttttttttttccctatcaagctccattatttgatcgtcaaatttccacacaaactaagtgtcacgtgaaatatttcaaaccaaattatggccaaatgggacggaaactagtgggtgagcgacgccaaaaagatttatcataccgtgtggcctacattgcgtcactacaacgttgctttcagcagcacattgccatcagctttaacgtattatcctcagcagcagcttttgtgaagtgaagcttccttagccacagccccatgatttttatttttttttcctttttgaaaacccgcccgcaaaagctcaatagtgtttggcgtcaataacactagagccaaggatttacttataaaaataattaaaaaaacttatttataatcatttgtaaaataagtttgtctaaaggattatttataaaatacttctccatcccataaaaaaacaaactcatcgtcattattctaccaatccatttagagtggagttatcgtcacctaggggcggaaacccaaacccatggataccctctgagtctccccttcaattttttcgtcatggttaatatgatagaatgtgctaaaggtttcttaatagtattttaacatagtttaatattgagttaatgtatttatgccggtgtactcggtatgttgagtccccaaattttttgttcctggatccgcccctgccgccaccccacggttggcggttatcgcgaggtatactatggttttaaaatccggaaaggttagcgcaggtgatatataactaggataataggataatcgtacggttttataaattctgggaggagtaaatttttaaatagatttaaaatgtaaaaaaaattccatgcccccagcccactgattaatccaccgccacgtcgctgtaacttcacctgcggatatattccccctcccgtccacctcaccccccacgcgcggcggcgcgcgacggcggcgggcgcgcgccgacgcaacgctgacgtcgccccgcgcgcgcgttcggcgccggcgcttgcttactcgctcgctacgttctggctctcgcaggcatggacgcgtggctctccgctgctggcgacgaggagatgaggtgtcgcgtcgcgccggcggcggctggatgctcgcgtgcgtgggcacgcgtgtgctgcggcgctagcgaatgggggtgagattggattggattggaagcgagagtgacgttcgctagctgggcatctgctgcgaacgccacgacgagacgagcgaggagttgtccgtgctctggagacatctgaaactctgaatttttctgaacatccatatgggttctgatcggtttctggtcatctggattattttttttttctgtcatgcctggaccatttcatccaaatttgaccgaatttgagcataaattgctctctgcgtttagcaactggagctatgagatacatctaaaaaccggtgttttggttagctgttcagataaatttgctcttagatatggtttctgccgttaagcaagtaaccgggctttcatttagattaattatcatcactgattaattaattgattatcaacttgattataagattatattaatttttttacaaataaacataataaatactccatccgtctcattatatagcaacctaagattgaatgggatatttcatagtacaacgaatctgaacagagagactcagtcctaggttgctatattatgtgacggagggagtattgtaaaacaagtaatctaaataatacaatcgaagaaagttttttgagaaaatgtatttttcatgtggagctaataatcgaataagctgaaaagaacatggcttctgtttttggagaaaaaaacaacatgcattaattcacataagtttaaaatacatgaaattcagcttgctaaaaaacatatttaagagcaaaaacaacagtgggcagcaatcatattccaaatgaactttgcaaattattcgtcgaatgactaggatgtgtcactctgtcactagatgggttggcccatatatgccggcccacctgcgagcctgacttgttcctactctgctcctctccaatagtggcctcttgcaaccggtcatggccctccaaatatctcgcccaaaaactcaaatcacaaatgcagaatctctctgttcagaggatgcatccgagagctagcatctttccctccctgcagtgcattggaccagggtcattttcagacctagagccgtaccaaaattgagcccgctgactgttgcactctcattactttctccgttctaaaaatataaacatttcttaattatttaataagtattaaaattaaggaaaactatcgtctttcagttgtctcggtggtcgaattttaaattttgaattatttagattcacctcccaagcatctgatcagctgaaaatatatgaatttccgcgtaatgaaatcagcgcccaaaaaaaattacattgccatataaattttaatttgacaagtaaaaataattatattttaggacggaaagatgagctccaagctcgtaaaatggacagcaacgtggagagggagcatggccactatcagcaacaggaaagcaaatttgtgtccatggtcattggtccatggatagctctgaagtgtcctcgccataactatgcaacagcgacctttgcgatggcgttgcccggagcaaagacgaaggagacggctctctggattagtgtgaacacggttgacgacgggtcactgtatacgagtgtatgatcgctacgctacgagctttagttccttccaaagtactgtactttgtggcaatgatctcgagtcgatcacgtagtgacactgttgctgtacggattacaaacgtattgttgcattgaaagatgttaattagaagttttctcatgggctcatggcatttgatatggttaatttgcagtttgggttacatgtctgacaggcaatggcgatacctgtctttcttgggcttttgtgaggcccaatgtgcagaaacagttaatcacggcgtgtttagttccaaagttattcttcaaactttcaacttttccatcacatcaaaactttcatacacacacaaacagtcagctttacgaagcagattcagaaatcagaactagactactagttaatcagttcgatcaggactgttcatatcaacttactatatgaaactagactgctcctcccagaatgttaacttaggaaaaataagtatgtccaatatagtagttttgatttttttttactctcatatgtagttaagaatgaattaaaatgataacattgtagtaccaaacaaggcaagcgaacgcatgattctgcacagtaacacactgacaacttggctacactgcctacacatacaacacaaggcctgtttcaaatgcaggaattttatctgatttctaaaaattctataaaattcctgcgtttcaaacagacttcagataaaacgattttatgctaatacttatgtaatgtaccagtacggggagtactggagtttgcatacatatcatgcaaacctacaaattgtgtaacgtgccatcccggccggccggcgccgtctcagttgccgccgccgccgctgccggcggcggtggcgccaactctgacatccgggttgcgcaccgtcttgagccacatcccggcgagcacccgcgacgacaagctccacacgacgtccggccgctgcctcgcctgagacgacggcgtcgtcgtcgtcgtcggcgtccgcgctctcctgcccgcggcgcgcgccggcccgtgcgcgagcgcccactgcattgccgtcagcttctgcctctccgcgccccagctcgcgcggccgccgccggcgccgcctcccaccgggcaccgcagctgcacgccgccgacgtgcaggctcctcaccttgaacctcccgccggtgttccccgccgggccgagcagcc

SEQ ID NO: 50694 - DNA, 737 bp, Oryza sativa
tgaagaaacaaaataaaaacttgaacagttgaatcagaaagcagaaacaatactttgttcgcccaaaaaattctacgctttcttttcctttttattgagctaccttctagtcttttacatattgcttcccaggttggttcctaggttctccctactgtcgaggagccaaaaagatttacacaccacgtgcttgcttatacacattttggggatataaaccaaaagggggaacactatcctatacagagcaaaaaaaaaaaggactggaaatctatatgtctgtatctgatctcaaaagtctagctatctgcctctgcactttcagctttattttctgcattgccctggccaggttctgctgcttcacccaagtccccttccgtccatcgctgttcaggaacaggcgcttcatttgaagcaactcccgaaccgtcaggctgcgcctggcaatgaggttgttctgcaccttcgagtgttacttcagtactgcccctgtttggtgaacctgacgtgttgctctggtggcatactgcttcgcacaagtcacctgacatccctctctgctcagggataaccggttcctgggaagcagctccagaactgtcaccctgtgcctgacaataaggttgctctacactttcaggccttactcttgtgctgtcatttggtgattctgatgcttctgccttatagctgtctgttttcatctcacactgctgctcggaaacatcttcggg

SEQ ID NO: 50695 - DNA, 853 bp, Oryza sativa
gtttaggtcctccaactggttcagatgtgtcactccggtcactaaacttagatttgaatatcatttaggtcaaataggatggttaaagactttatatttaaaaataattcataaatttttcataggaactctaaggaaggcaaactttatatcaaacttgtagccctggacgcgatctacaacttggtaccggaatttttttttattgtaagtcattttttgtcccaaaatgtaattttaaaattaaaatttcaaaatctataaacatgcaacaatattttgggaccctaaacagtgtttaattcaagaaaatttcaactacataagttgtagatcgcgtcgagggctacaattttgatacaaagtttgtcttcattagagttcacatgaaaaaattatgaattattttttgatataaagtttttagaccgtcctctttagggactggggtgagacaactgaacaagttgaaggatctaaacgagtgatctgcaagtttagagaccagaatgacacaatcgaataagtttgatgacctacatggtcgatttgcgagtttaggaactgagataacacatcggtacaagtttaaggaccaatgatgtactttacttaacttttaattttggcgtgaactaaacacacccttatcctcgtccctccaatcctttctagcaaggtaaaccctgaagacgagtcgctattccaccgcggatgcgaacggcacaaccgtaacatatctctccattcacacgtgtataagtaagttgcgagtagtaggctacagtagcaagagtactgtacgagtaggacagggacgtgatatctttgtttggatttcgtgggatccgtt

SEQ ID NO: 50696 - DNA, 1553 bp, Oryza sativa
ccaatttttttacttgcttcattcattgttgccgtcaacctctgatatccttaaaacagttggatcactgttggattggtgaaagccagaaataaaggctccccgaggacacccaacatttgctctagttcgagcttagtgttttctatattttggatttcctgaggtgttaatggaacaaaaacaaaataccagaagattcaaagcttatcttcatcatatattttattatgggtaaagcaaatctgtcttctactaaaactgcacatagtattatcagcatgtaagttatttgaaggagagtaagtaaaagaactgaaaaggatcggattaagttaaggtttcaaattttatgtaaattagaatggttctaaatatagtgaaggaagaatggaatacagagaaggatgcatatggccatatgggttgtgttttactgtcttaccatttaattactcattggcaacttctcttatgcctactcttacactactatatcaagtggatattgggataaaattacaatccacttatcattacccaagttcagcaagtagccacagccagaacattaattcttcttagctggggatgaaatacttgtctcccttgatgccacagacaacagcttccagaagaatcaacctaatcccccagtttttttttttcacatgcatgttcttgtcagctagggtgttagttttaatattgtcgaggaggccagtttaagatggatgaagtagaactgcccaataaaggaatatattttctgttgctgcttacgggagaagacaatcaatccatatgaacaggagtaaaaattccagtgccaattgaaagttttcatttaggaagcaactagtatttttgcagcacaactattattcagaatatcattcaagagtaccccattcggttgtagagaatgagctgccatgtactcctagtgtctaaccttggaagttggggtagtagtatcaacgatttgtgcagtcagtacagtagaagtcaaagagccaacatgttaaattaaagatgagtagaaaacaaaaacaaaaaaacaaaatcctcatctaataatcttaacagatgctcccacaatcccacaatatcaccatctaagcattgaggcaaaacaataatcattatttcaaccaggagcaatttgatcagatcatgcaccgacgctgaacgtttcgatccccgcgggaattctcgctccctcggtctcggaggcgcaagtgcgggagcgggaaggtggacggcgacgagaagaggaggaggagagagcgaaggcaacgccgtcgatggcgacgaggggggagaggtggacgggtgtctcgtcttctcacggtggtggggatgaggaggggatgctaatatgctattttgcggcggggatggggaggaggcggcgccggcgctcgcgggagagtaggcggaagcggcgggatggtgcgcggctaagttgaggagccggatatgggggcgctgatggataggaggaggcggaggcggcgaggggattcgaagcggcggcggggtgtatttcg

SEQ ID NO: 50697 - DNA, 2667 bp, Oryza sativa
tatatatatatatatatatatatatatatatacctcatatggggcaccatggtatcaaatgcaaaaaatcactcaaattttttaaaattttcaaattatgagtatatacctagttataataattcgattcatacctatacctatcaacaaaacaactcaaatttaactttatttcacaatccatgattacatacctaactaaatatatgtatggatgctatatacctagaatcaaaatctaacaaaaacaagttcaaattcagttcaaacttgctttgaactagttagtaaagtggttaatgttaatacctaagtaattgaaaaagattcatactcatttgaattgggtatatactcaatttcaacaatggtgcccgggcaccatggagcaccaaacaaatttactatatttcaccgtatattttcccaagtaacgcagctagctaggcagcatgtgtgtgctgcgacatgctttgctttgctctccgagtgtcaacgcattttccttcgtgaacctgcgtgcttgtatcctagggtgatatgtcagttctatgttagtgcaacaaataatatatttagtcgtgatctggacttgatttaattccatcgatcattcacttgatcatttcacttgatcaagtgaattcacttgatcatttccatatgtaatatgttttatctccttcctcttattagtgatggtaaaattaattgctctattaacatatggttacaactttagaagcagattgctcattcagttatcctgctaaaccacagttccaaaattaaatcattttctccagctcgcagctagtattggtaagaggtgaaaatggtgcgaatattttccaaccacccgcccgactcgaagctagcgagaggaatatggaagaaaaaatagaatatccgatactatccaagttcgaatccaaatccgttagaaagtatgggttaggatacggaaagacatgtatccgcccgtatgttctataatataaaatatgtatgaaaatctattataaatgtacctataaacatgataaaagattgttaatccctattttacgagatctcacatgtaatattatatattttttctcttgatgtatctcttttaatactttaattaatttattatatttaatatttatgaattagatatataaatagatatccgtttccgaatccggttcgaaggaaataatagataagcgatatgttatacggtaatacccgtactcggctccgaacttaaaaaaaataggttaggatatgggaatgtcataacccgaccgtacccgtccgttttcacatactagtttctcctgttcctatgggagcaatcttcattatgcaggctgctcatgagatggcaaacctgctccattatagattaaggtatgcgttacactttgaatatagcccattctgctcctgattggaatttgtattttgtaatcttgccttgataaagtccttggtgtgaaattatgctatctttagcttatttttactttactgacgcagattccacatgcacaatgataggtgggaaatacatgggagcaaattaagatggtattttgatgttcttcaaaagagaagggtaggtggggagtgaggagagataggtgtgtgggttagggtttatagatgcaacttttcagttaaaaaattaacagatgtttcacacattttcagttaactgatgaatatctagtcccaactttataagtcgtttggtgtaaattatacaatatcacaactctttgtatattatgacaacaacactctctcaccccctaacacaatggcttggcaacaaccatggcatgtcaagaagccgctattacttttagaaacatagtactaacgcatatgctatgctcttttacacgcgcttgcgttcatccttacgaacgaacacacgtacactctatacatatgagaactcctgatatgcaatttcggtaatttcgaaccccaccagcaaggcaatatctcagccaaaattttttgtatttctctctttttttgtgtgaatttgatcaaaatttattcaggtttagtcaaattatgttaaaatttcatataattttggtgcgaaaatcccaaaattttagaaattttggtgctaccgaaattttgaggaaaatcaaaactaaaactttagatacgctgaaccgatatatcttaagatggtaagtgtcacaccctgaagttcttctcccaagcctaaattaattaataaatggcctcgagaaattacctgtgtaaaagcaagagagaaaccctaattaaattaatgaaaataatcatcggaaatggcatgcggaattttccttgagttctccatgtcaaaatatgctaacaagatttttagtggaattttcagagctctaaaaataattttaaccaattaaaaatgagcacaagcattatttaaatccctggaaattctttttcccctcccttctcctaatgggccgccggcccattctttctcccttcccctccccgctgggccggccgaaggccacggcccagctgagccgcgcacctcctctctctcccggggtcgccgacaggtagggcccacctgtcgggcccgtccccaacctccagccggaggaggaggttggcctccccaaccactgcccccgc

SEQ ID NO: 50698 - DNA, 3116 bp, Oryza sativa
gccgccgctctccactgccagccgctcgccaccgctgcgccggtgccgcgccgctgcgcgccatggccgccgggccggcttgagccaagcccgtgcgcaccggccgcgcgcacccgccgccgttcgatctacccgagggtagatcggggccgtccgcctcgccgcccacgtggctgccgcgtggccgccacgtcggcgccacgtggtagaccctcctccctggtcccgtgggtttggtccaccatgagccggcaccccgagccactgccatgtggggcccgcatgtcggcgccgcccctctctctccagggttaatttttgcgcaataaatcatttaagggttttctgtttatagtaaaaacacagtgaatcttctaaaattcatagaaaattcatctgtgctccgtttaagcccattcaagtctcagtaaatcaagaaaaatgcaaataacccattaaaatggttttgttctctgtttctgtagtctcatagcctgtttgtattgtttactttgtatgtcgtttagattccggctctcccgatgctccggtgtactttgagatagtcgccgaggttccaccagcagcagagtaaggcaagtcatgcttgtcacttgaacatgttgatcctatattgcaaatgctctatcgttttcctttaaatactgcattgtttttcaatgttaccatgggatatttatctactgtctcagccatgttatttattacctcgttcctttgttatcttggggttataacatgattagacgttggattaggaattgcttagccatgcttagctcaactagcacacaatggaggaatcacattaatgcatagacttcaggttctagtattgttgttggtttagtgccaccactctggtgatggttaattaaaatatattaaatggtgggctgtgggtgcatggtattgatggtcgcatccatggcagttaaggaccgattcgcgggaaaccctggaagaattcctcgtacttaccacaagccagcgtgggcaacggctgggcttgtagtgtagctttcctctagctgacgcatccaggcaagggtgagcgtgatggagttcggatgggccctgcgacggcctatgcggctttcggattcacctaagcacgagaggggactgcccactgccttgcgaggagtgggggtgaaacctgaggtgtggtgtgtttggttagagggggttatgcgaagggtcctgtcacggcctctttccggtatgtcatggtggcatgttggcgcacgggaacgtgtcgtggggttgtgtcttgtgggtacagttgtacacctttgatcagagtaaaactattcgaatagccgtgcccgcagttataggcggtcaaccagattcaccgtgattagtctcaccctaatttagtctgatggaattgattagttcaggtggatggttgggcctgttgcaacgtggtgtagcgttggacagtggatggttaatattgattaattattacaaatgttttactgccttcaactactgtttataaatgccgctttgtgcaaatgaaccactctagctatcatttggttatatcctgcatcataccctccgttccggtatgacttgctgagtacaatgggtagtactcagttttgctctacttttccccaaccccagagtttgagtatgcgtcagatggtggctattccgaggagtaggcttcgtccgtgccgttgaggatgcctgtggagtggtgttcccgctgcaatccaagtcaaggcttagctccagttatcttttatatttccgctgcatttatgtaagacttttataatgtttgtaagacgtggatctgtatgtcaactttgttgtttgtttaccctggctgatcctggacagggattttaatgcacattctgcttggaattctattcggaaatttatgggcgcgacagtaattaagtcaccatgactaccttcgttattgaatggggtatcgcctattacatttactacctgcataaggtagaaaaccgttgctacactactgtcaaacaccatggcctgcgacgtggctaaaaggtttagttagaaagaaaaagtatattagaggttataaatttctattaagaacgtacctaagacagcttcacctatggagccaacccaaagtagccacgttgctgacgactcaagtcaagtggatcatcaattccactgtataatttcttcattcaattcgacgaacacacgtctctatcttgcatataccgagaggtccaaaacgatgaggcgttgacatcatcagttaatgacttaattcggtcacattatatatagtgtcaacatcttgcactagcacataaacaattttttgagatggtcacgaaaatcaaattttcacgtacgaacgcttaagccggccgtctacgacaataaaaaatcaaaccccaccccaaaaccctagatccgccgccatctggtcgccgttgtcactcgaaaccctagcctgctgcttccgcccaagttatcgtcgttgaggtcgttgtcgttgcgggggagggcggctgtcgccggatcggcgcgggggagagccgtcgccggatccgtgcggggaatggtcgccgcccacccgagccctccatcactggagcttgcgccggattcgtgcgggagagcatgggggagggtggagggggccgctgtgcgccatcacctacgcccgccgctagtacccgttgttggtagggaggagatgggagaggaggagcgggagtgggaatggggagagagaggaagggagaatataaaaagagttgtaagaggagggattttcgcatatgggtcacttaagtaactgtattaaaaatggggtcgattttttagatgcggaccccttctaaaccgcttgcaacctatggaggtgctcgtccagaaaaaataagtgttaattagtttgtcctggttatgcatgcagccaatcagctgcatcaattgtccctatataagcctaccttacctctcgacatcgatcataatcacgaacactaatcagccttcctcttgaaacagcaattataatcacgatcattagctcgctgattgataactaacagtggtcctaatcatgg

SEQ ID NO: 50699 - DNA, 2791 bp, Oryza sativa
tctgctggaagctaatttcccctcctttgatgtttgaggaaggagatccccattggtgcataaaatggatgcatcggaagaaaaccgatggtcattgtctggtgaaaaaggcctcacatgccttaattttggtttgtttcttgtagagacatgctcaatcgaagaaattattaggataagggaggcttaagctgatgttgaatatatggtgtgttggaggaagagcaagagacacacgctcttgctcaggtgttcatcctaatccttttataatttttgatttctcatgtgcaaaatattttcttagatgaaattgctactccttgtggcatttaaatctgatcatggttgccaaagaaggattcaagcaggcagcgccaaacttcagagatcaaacatgctgagaaatgtgaaaaaacaacagccaaaactttttgacaggaaaattctgtaattctgtaaagtggtagggttctgtaattctgtaggttaggttgaaattgacatctcattactgtaatgctggaatttcagtatgtaatatcaattttttgggttatttagaaagacaaatacagctgatgggtatacgatgtggtttgtataaagacaatttgcttctttcttctttatcggaatggttataattcatttctgcatatgtgcacgtgcatcttcttgtataaatgttgccgtagcggtagcactggcatgctactaggatagttaaatgggacaacttaagtgactattaatgcagtagtgtggaattatatccatatttaaagaataagcaagaaattattatcagttcaatttgataataaaaaaaactaaacaatcctactgctttcaagaatttttcatgtttcacttctaatgcagttagcacaccacagatattcagttttaatccattcggacactgcgacatatatgttcacacaatgatatgtgtgagttgggaactgccttaaataaattatacagaaactttattctcttttatgaagagataaaaggaaaaatatatattcagcagccacccaacagtacaaatagcagaaaatggaatgcatttaaccgagggagtaaataggtaacttgtttgttatgcaaagttcagataatacacaaattgtttcgtctactataatgttcgtcggagataccacgatattcgtataaaaaagaacttatagttctgttcaaagatttgtggaaacaaatagctttattatgtactggtcacagtaaaaaaatataacaggaaatcaaggcattatccaaagattatttaaaggaaattaagattgtgctaactgagggatcaagcagattgtaagcatgtccttactaaatcaaatttagagatgcaagtgggtagtcccgctacccgcataaaaacccgcttgttagtctatttcccgcatggtagtacaaaatttagaagaaaaaatgaactagaagtggaataagcgggacaaaaaaaccctcttgtcagccccgcttgcatccctaatcaaaatgtacccacattccgacatagcacaggaaaccagattcttcataaattgttgaaatcacattccctgtttagacaaaaaaaaatgcattagatgtttataaccgctcagattagaataaattgtacaatcctcaggagggacacatacctgttcagaataataaaaaaaggacgtaaaatatgttatatcgacgtgaaggtaaacaagtgccacaagtatgttctgccaatctacatccacacaatatacttagttacttaaacttacctgatcagcaactcagattggccacacaagtcgccgacgcatcataaaaaggccgacgtgcaaaatatgtggatttgctcaggaggatgggtgccaatgtgccatgccacagcgccggaaagtgaatttgtgcaagccgaacctgattggttacttctcttgctggatcatgcagaagtgcagaaccgcagatgatatcacttaccctcatgttgctacggcgagcatggcacttgcggaatgggattgagttcctctgcagtcgactgcagagtgccatcgtcagtgacatgtgggcccaatgacctccgggcccatatgtcagtgacaatggtaggggtgcagtgactgcagaggatctcatttggcggaatgactcttttcatggcaaaggcaacagctcggtagatggctctgtccagttcctgcaaaactatgcagagaaactgctgctcatccgacaaaaaaacaagtgatttaaagggcaaagcagacagctctctacaatgaccagccgcacgcatccaaagcctgagagcagcagagggtcaaagaagattaacaccttggaaggcgccgccaacaggatgggcaaagatcaacgttgatggtgcattcacggcatatctctggaactctgaaggccaagccctgctatcgtcgtggaaattcattcggcaatgcaaggctgcggaggaagcggaaatcctggcgtgttgcgaaggcctaaaaatgcgggtcgaattggaaatggactgtgcaatggtagcaacaaggctgactagcaaagtacaagacagatcgcaatggtcctttcagatcagagaagcttcggcgagcaatggcaactcttcagatggtgcgtgtgcatcctagcaaaagagagctggatttttcacattttggtccttttgaaaaacttatttcgcaagtagacccctagaaaaacttatcccaaaaatagtcctttttggggcgccagagtggctggcgcc

SEQ ID NO: 50700 - DNA, 682 bp, Oryza sativa
ttcgtgcaactatgaccatccttttatgaacagtgtgtaaaaaaaaaatctgcatgtctaattctgcaagatggcattacacatcttccccgttataagtgaacttgctaatgtagaagcagagtaaaaatagcacgaacagctcgcttggcagctctgtctgcgctggtcaatgttgatcagaattcaagatcgatccagcaagcattccctctccttgctggatttgaaaatggaggttgtaactaacccatgcaaagtgtaaatgttagccaaaaaaaggtaaattagcaaacatgcatgtactaactctgagatttacaggaagagtattactatgagaacaacctgctttctgaaagcaaataattagcttgctagaaaagtaagtgttcgtaaatcatctaccttacttcatattgtgaggtagttacgcaaattcaaagtgcaatttatcgaagtgtatagaattaggtatagcagtggaagtgtgtaatcaagaggattttcttaatactgtttaagctgacttaaagatcatttttacaatacaaagcaaatattaaatagattatgtgaaagctatgaagttgtggtgtaacatatggaaaacagaaacaaaatagttttggaatggtacagggtagcatcatctgaatgtcaagcaaagcaagcaacatat

SEQ ID NO: 50701 - DNA, 2580 bp, Oryza sativa
ggagggtataaggtgtgcatatgtgaattcatagggtgggtgtgctcacatttatataagcgcttatgattgcctttacatcgttaataaaaaaataatttcaagaaaattgacggaatggcgtgaaccgatgccacggcagggcgacttcttcggcaacctcaccagcagcgatcactacatatatgcacaatctgaggaaaactttaaggttgcacagacaaaaacctaccaaacacgatggatcatacatatgcgctcttgttatttcttttcctttttgacatctattgtgtatgtacgtacatagagagggattagctgtttttttaaatggggttacttgagtagattgaatagatctaatctaactggtgaaaataatggatttactgtgttagccatgtacatttatggctaaatgttttgctttccccttatattttgttcttagactttctcttatttatagagcaccacatgcattttagaagagtttgtaggattgtaggaacgctattacttatactcgcaatatacttgtagtcaactattgttttttgtggcttagtggcgtcctctacttacctatcatttgctgatggttgctcacttagtatcatcctttatcttcggtgcttgataacaatcttgttgaatgttagtgcacggatgccttgtaagcaatatgacctgacaatttatggatagtagtttgtatataaacttatatacataggggttagcagggatatacgattgatatattatgctatttttgattgacaaagtatattacatattaagcattttagtatataagaaataaatttaaggttatattctaaagtgcttatcggattggctactcccttgtttatcgtgaccacatttactgaatttctaaatggtgcatatttttgcaaaatattttatatataaaaattttctaaaaaaccaagtaaatccattttcatgttttaatattaatacttaatactttttagaaatatattaatacttaattaaactttctctaatgacctgtgtcgtttcacgtgccctggataagctcacccaataagctagatcgaacgaagtcgaggagtgagataaacgacatcgatatggtgtcaagagaatatatttgatctttaatttgctaaaaatatatgaatagagaaaacacataatacaagaagatatatctgtgataatttttatttaacatttatgataaatttagtatgtccttttgacgtatcaatatttttatagtatagagaattggagttgtttttatttttgaaaatgcatgttcaatttaactattacataatctatattttaattaatttattttttatggatgttttaatgacatgcgtctagtttgaatacaactaaaaataacatatatttttgcaatttaaagtatagttaatatgggcttgaattattagtttagtttttctatctaatctaaaggagaaaacagaaaaaaaaaggatgtgggatctatgtatgtacgtaccttttttaatgaatacttacatatgggctaggagccacatcatagcttggtctttttacagataaatttaagagttaatttcacattgcaccatatattttgaccaaattttacaatgggcaagggccaaaccaaccttttcacttaacaccacatatctttgcactagttggcactttggactagggttgagcacattaatgaaagttgtcagagaaaagctagttcaaatcatcatttttagttccatagtattaaaataaatatctttagaaagaaacagcaaatcacaaaacaacttttttcagcaaatcacactaaaataatgatgtgaacatgtttaaaagtggcacaaaatgatctatacataggggcaaatgaataaaaataaaatagaaaatagttaattaccactcacactgaaaagaaggaagaaaacataaatgttttgccttttataattatccctgtgtaatcatatgaaattttctcacattcccttgatttgctcacccctagtccaaactgaaaacttatgtaaagatgtatggtgttaagtgaaaacattgatttaaccctagtccattatgaaatcttggtcaaaatatgtggcccaatgtgaaatttactcaaaatttaatcatgagatagatttaatcgttaaaaaaatagtaatatgggcttgaattattagtttagtttttccatctaatctaaagaaggaaaaagaaaaaaaaaaaggacgtgagatgtatgtacgtacgtattttttttaatgaatactcacatgggccaggagccgcatcataacttggtctttctacagataaatttaatcctaaatatatctaatggttaaaaaaataggaagctttttccctaagagattatgaaagaaaagaggagatgaggggaggacgtacgcaccacagaagagtgggggtacgtattacgtacgcaccaaggtgtagagagggtggattttttttaattaaatctaatggtaaaaaatattggacccaccaatttaaagaaaaatcaatggt

SEQ ID NO: 50702 - DNA, 4150 bp, Oryza sativa
aatataaaaaattttacatagcccccacacataatatgaagtgtgtggattttaatattttcaatatgcatgtattaatttttttgaaaatataatttatgtttcatatgctctagcgtcgagttcgtttatgtaaataatctttcatatgctacataaaattatttttctaatatagctatgttttgtgtgtgtgattcatctttcatataccacataaaaatagtttttcaaaaaatatttttgaaaaaaaaaatcttaaaatatatatagaaactttatatcatataagaaggctacactaaaactttcatattttttttcaaaacttataatgagccaatcaattggcaatccttgtatggcttgaagggaattttaggtattttttgaaaaatatccatcccgatggcatattgtagaaaaaattgacaaagttggcatattatagagaaagacagtcgatggcaaatcattaaactagagtaaactcaggggcatagaatggattatctcatatatataacttagagactggaataaaataaagagtaattaggatgatctaaatctacaagaagactgtaaaaataaacttcggtggaatttgacaaaagaaggaagattcactgtgaagtctttgtataaagctcttaaaatgcaacaagtgaactttcggcagaaaaaaaaatctggaaatttaaaatttctctgaagatcaaagttttcatttggttgtttgttaaaaacaaggcactcacaaaagataacttatacataagaggttgaagaaaaggggatagaaaatgtcaattttgtgaaaagatgaaaatgtacaatgcccatggccagacttctgtggaatatagtaacttgtgcccttagttggaaacctatgctgaataatcaagatctgtttggacattggcttaacaatcttgtaaacacacaaaaaaaccttcttgtgataggaactagttgggcggccagcgcaattgcgcggctagcattaatttaaaattatttatttattatacatgattttatttaaaattatcattcccatgattctaattattttatagtttttaaaatccacgccagtcactacccctcactcctttgacaccttttttatatggttactcgatctaccactacttctattcatcctctttaaaactttaaaaattacgccttatagtttttagagtttattatctcgtattaggttcttatatggacttttatttaaacatttcttattttaattcctaatttcagaaatttttaaattgtattcctaggtggactcttcttgttttttctaatttctggttttattttatttttattccgaattttgttaatctcgtattgggttcttatatggactcttcttttaatattgcttatttttaatttcgaattttagttcttttcaaattgtattcctacgtgaactcttcttttattattttttaatttcagattttattttatttttattctgaattttaattaatctcgtattgtgttcgtacatggactcttctttcaatattccttatttttaattccgaattttagttatttttaaattggattcctacttggactcttcttttttttctaatttcggattttattttatttgtattctgaactttgattaatcttgtattaggttcttatatggactcttatttcaatattgcttatttttaattccgaatttaagttatttttaaattgtatttcttcttggactcttttttttctaatttcagattttattttatttttattctgaattttgattaatctcatattgggtttctatatggattcttttttcaatattgcttatttttaattccgaatttcagctattttgaatttttattaatctcgtattggttttctatatggactcttctttcaatattgcttatttttaattccgaattttagctatttttagattgtatttctatttggactctccttttctttttctctgattaatgtgggaatttctagcccccacagcgaacatggtgtcttctttcaaaactgttttaataatataatagaatataatagatagatagatagatagatagatagatggctgcaattatttggccatttggaaaactagggatagagcttgttttgagaaaaaaaaaacccaaataaccccactgatttggtttttttggcaatgccattgggttgaaccctgggctgttatgcagaagccggaagcaagcccaaagaaatctgcagtttaagattcggatagagggctggcatcaggaggattgaaggctgatggagatactggtcatttggagaagtggggcttcaggggttttcgtgttctcctccgcataaaagtttgttgatgtatgctggcttgatctaatctgtgttgagagtagtttctgttgaagggtcaattctgggcacaggccccgctgttagtaacttcaattcgctttttgtttttgtgttcagttttaaactgctttgtaccagacttctatagcgtgtttgctcatttctagtaagagaaatgggggacttcatgacctagatcaaaaaaaaaaaaagaaaatcagtactctgcacaattttcgtcagtactagtttgcaagcgtttttttacatcatattcagggttgttgaagtagatacggaaacgtgtgaagcgcaaacttggccggggtttctgaatacattatacctggaaaagctctaatcacccaagctggtgggtaaaatgtatctgattctgtcatatagataggtaaaacattcatcgcgatcgattgcctttctggctggaaaaatctctgtttggttcgtgatctaaaacaggagaacttgtgagcatctcaaacctccttgcagttgtatatatcttcagaacttgatgtcttcttatattagcttacctactgtaccaatcatactatcttttctagaacttgatacatgtgtaaccaatctaacctagaaaagttgttttttttaatggaagcaagataactaagacaatgatgatcaaataaagaacaaacaatgctctaatatgaaactgtgaacatccatatatctcttcttttgtacctataaataccctgtacagaaatcattagttcagtacaacaatagcatcgattaacacagtgattaagaaagaaagaaacagctaattaatcagtcactaagccaaaccatgggcaagaacgcgagccgcctcgccgtcgccgccgtcgtcgtgttcgcgctgctgctgtcgctccggcagctggaggcggccgacgacgtctccgtgtcgtgctccgacgtggtcgccgacgtgacgccgtgcctggggttcctgcagggagacgacgaccacccctccggcgagtgctgcgacggcctgtccggcctggtggccgccgcggccaccacggaggaccggcaggcggcgtgcgagtgcctcaagtcggccgtctccggccagttcaccgccgtcgaggccgcgccggcgagggacctgccggcggactgcggcctctccctgccctacaccttctcgccggacgtcgactgctcccagtaagtacactttgcagtagcagtaatccagtgacacgccatgcattgtgctatagatggccatatggcccgaggcccgatggccggtgatttgacccggctcaggcatggcacggcttgactcgggtcatgcctgtgccggcccggcccaacaatcatgctgtgcctgggctgctacctcaacacgctgggccaacacaacccggcccaaagttcagggatgcgaaacatacttattctcaaccatatgtaaggcaggtcacaaagaatagagaggaaaaatagacatattatatggcacgacgtaaaaagtagggatataaaatagacttattttagctattttaaagagggaggggaaatagacttattttaaagaaggcacaatgggccacccgggggaagtatccggtgcaatcatgcaactttcatcttacactgttggatcgagaaatggacgcccgagattcatccatgtcaccatgagttaaaatttaactcacagattccctcatgagttaagggctggtttggt

SEQ ID NO: 50703 - DNA, 2621 bp, Oryza sativa
atcgggttcatccaacattgtatgcccgcatacaagatacgtatatatgtataaccacaaagtcatctctgataccatttataaagtttccacacttttaccactaatgataaaagtgcaagaccatggattattatttaacaaactatgttttgtcaaataacacctggccattggagatcacaagactacaagagaaatagttagagttatctttaatttgcctccaggagtcttatgaacatctatactctgtcttataactgcaaagaacaaaacttataaaggagttatatagtaaaggtgggcactttcatacttagaaaatcattaatagcaaaatatcaatgcacgaataatagtttatcaatttatattatatactatacctatataacatcatcgccttcatcattcatcaaaactctaagtctattttgtaaaaggattataaaaaagatttaaaaactaaattacactcataacattgactagagttagtaacaactctgtgtagctttcaattcaagagacaggcgtgactcacaattttattgagcactgtgcaggcttataccactttatggatagtactcttatttttaggccttcacattccattcaattgttagacttctcagagtactctcgtttccatttactatactccacaccaccatgtgcattgagaaagtatgtatcatcacttggtggggtttatatcatctcccatcctaactatttgcggatgggatttgtatcatttcccatcctattactccatacccatgtagagtgtaataaagttgataaggtactaggctcattccgtcttgagacggatccataattgatagggtttatttggttctctaatactaataagaggtgattaattcttatatgcatacactctattcagagagagccctaataatcatcacttcccctgagctctccctatccatcatattaatatcctgatataatcatcatcatcgtcatctaccaatcatctcatcatcaacaataatattttagagaataaagttttgatacaatactaagagaaatattttacaaaatacagatttttaattaaaatagtgtcatcaacatctatcaatatgatcaaagagagacttatattatgccctactgccaaattgacttattccaactcttgcctcattcctacatttcgttatatacgttgaggtttaattaaattcctaataggtatagatgggtttgatgggaactttgaatctttaagtgtggtgtttgtaatacccccacaatattatatgggtaccccgcgcgttgctgcgggagaattatgtatagtatagtagatatgagttctaaaattttctttcttacctacgttacgattttttcatgtgtttaaatatttttttacctttatcaattatccaaatgttataaatgatcgggctgtatggtgtgccttttggagggaagagatgcaatttacatccttggtgaatcattcaaaggttaaaaataattgaggtgatgtggctttatgagagaagagagaattagcagtaactatattttgtggggatgaattttatagatatataggatttgaaaaagaaaaggaaaagagataaagacaagaattgttgggctggcttgggatgctttggccttcggccagcgtaaagcagccgtagtgcaagcagtggcagcaccagtagtagtaaggaatttttttcatttttatttttttgttttaatattacagaaatattgtaccagcgaaaatatttatagaaatagactctgtaaccctccccgagggcgagggcgcagggtgacgtgtgtgagcaggcgctggaggcttctgagcgggcatgtgaattttgcatgcggtgaaaattgcatttcacctacctcagcgcaaaatgcgtacatggcgccgtgtgccacgtcaccttgctgctctccacttgggcggcatgatctatttctgtaaatattttcgctggtataatatttctgtgaatattaaaaaaattaaaacgaaaaaaaatacagtagtaagcaggcagtcggcaggcccgggccttggatcatgcagccgatcagaaacaacagttcatacagcgcagcagcaagcaggcagtcggcagcagccacaacagggatgatccttcggcgtaatgccgatgcagtaacagtggctaacacgcgggcatagctgggacttgggccgtgctttgtcgggtcggcccaaggcacgatggcccagcacgaggaaagcacggcccagcacggcatggatttgggctgggccggcacggcccgtagttgggctgtgcctgggccgtaagttgaggcacgctgggcggcacggcacggcacggccactgggccgtgcctgggccagcccagcacgaaaatggcccgaaggcctgaaggtcggcccagcatgaggagcgcaggagtcggcccgtaccgcgagcgcgacgaattttttttatttataattttttttattaaaagtttgacaaaaataattttccattttgaaaattgacggaagtagtcgcctaccaaaaatcgccctctcagagggcggcgaaaatgac

SEQ ID NO: 50704 - DNA, 521 bp, Oryza sativa
tgcgacattcgctgcaatacatttgcaatactgtaaacattcagtagcatgcgacaagacacaagaaagaacttagcgtaatgtactagtattgatcaagaatattgcaatgtatagatcgtttttactgaacataaaattgtgttctttgtatttcattgcaatctaacatggatgcacaagaaggatgagaaatatgagctaattaatttcgacagtcctcacgggcacattacagtagcaacattgaagtgttatttaataatggatctatttaatctctatagttttatcattttcccatctgatctaagtgttttctaacattatgttataaggatcaggacaattaggacaaagtaagccgagatctccatttccaacattcacgaactcaattaaatccaacctttccatgtcagtgcttgtacaccaggtagaaaaaaaaagataatgtacatatccccaacatctaaaattgttccacaaacaaacacatgtgatccttttcgcagatcaca

SEQ ID NO: 50705 - DNA, 796 bp, Oryza sativa
attttaaaaaagagagactttgtttaaataagtaataaagggagtgataagaactactccctttgctctattataagtgcagccatagttttccgcgcctaattttgatttatttgtcttatttgaaaaaaaataaaaacatacttcctctgtttcacattataagactttctagcattgcccacattcatatagatgtgaaacggaaggagtaagtcacaagcaaagtattattcatgttttatcatctcataacaacaaaaatactaattataaaaaaaattaaattagatggacgattaaagttaagcacgtaaacttatggttgtatttaaaatgggagggagtgagtattagattgtcattcaggaggaaaaaaatgactgaagtactcgaaaattccagtcacatagtaaaagctgggcactcctttttctttctttattcacacaaacggtttgtccaaccaaaccaaattagtaaattacaatagggcaccctatctattggttcaatttaggactaccagagaggttccagaggggaaaaggagtagggcgtgaaggcagtgatggacttctgaaggtggccgcaatcatccattaagtggatagcgatggatcgtcaagggtcagctcggttaggctgattatcatttggacgtattcgtaagaagctagctaggagtacggtttaggtggtctttttactctaaaattttcatttacgacgatagatccaattatccaaacataattcccataccattctatcatattatataaaataattttcg

SEQ ID NO: 50706 - DNA, 1170 bp, Oryza sativa
tctttataacaggggaagcttcagactgatctaaaggcaactacaccagaaaataacaaaacatttgcatctattatacaaatcaaccaattaaactgatggcaaccattggcattgctacctcgctttcaggttgtaggtgcgactgaaaaataatcaaaattgtttgcaaagtcttaagttgaacaatctcatctgtcatctctgcatgctgcaaggaaaatgaaacaaaaaacaggattgagaaatcatcagctaatattgtacagaatttgtttcaagaataaaacaacaaaatatcctaatgcaaaaacaaaaggacttagtaattaatcatgttttctaaacatacgtttgttttttttttcaaaaagaaaaacactatcagactcatcaggtcatcaggataactagatgacacaaaatatgtgattcagtttatacatctattaagaccaaataaagaacaaatgaaaatagtgagaggtatatggatacagaagcgatcaaaactcacatccttcaaagtagtcagtatatccttcaatgcagaagaagctacagcatcatgagatataagcttttgcaaacaggatagtcctattacactcagcttcactgatttaacactgcatgccaccagaaacatccgcaatatatcctcattttgagctatttccatcggactagatagagaacggagctgcatgccaaaaagaattcaaatacaagttaggaaacaagtagcatgacggttaaaagaaggaaacaagttaaaaggtactttgtggtctaacataagaaattacagaacttttgttcactatgcatcatctaaattgcaacacaaaattattggcttcacttgagttatggaggagatttgttgataccaaagatttaagaacgtcaacagattagcttcagataggcggaaggacatgcttaatcattatcttgcaaataacaggtatacagttggtaaagaagataaatgatctcagaatacaatcagtcatctggtcaggtcaatcatattagcatttaaagtatctcaaacgtttgagaaaagaaaaacaaagtggaagagaggcaataaacacatcagcgcataccactcaagttcacacctcaatttctagaaaatacatgaaaacaatcttgcttgtg

SEQ ID NO: 50707 - DNA, 686 bp, Oryza sativa
atttaatagtcaagggagtaataataagtttttttttaaaaaaaaacaccattttctatcccaaaatataccgcttcgactacgtaccatttacttaattttgtagttaatttcagaggtattttttattgctttctgttaatttcaggggtatttttattgctttatgtttcttttaacctttgctttcggaccgctcagatagcttttgaaccgcttagatagtcagaatatagtctagttccagcttcattgcttcgcttattcgtagaataagccaaacatcatatttacacacgggatataatttgtgaataaaacttttatatacgtgttcttagcgatctaaaagtaaagactgaaaaataaactttaatgaaaaaacccaaaaccaactccaaatttaaaattgaaaattcaaattctagctgataagcataagcgaaaagatgatacccttcatttattcacctatttcctccgtcctaagaaatagaaaaaagggacaaagcaacgagggcattttggtcaatttctaagtgctagcgacgcaaagcagacgataatgaatattgagcgaggcaaggcaggtgataaactcgaatgtgcaaaaggaatgtcaaacttgacatcaaattgtaggaccaacggccctctgaggagcatcgtgacaatagggagtatcg

SEQ ID NO: 50708 - DNA, 586 bp, Oryza sativa
ttaaagtacgttttacaactaatctatacatgtagtgaccatatttgaaagacaaatattttaaaaatgattcataatcaaagattctaaagtttgacctaacccttgtctaaaacgacaagtattatcagcaaagggagtagtatgcttatgatgtaatggcttgtctcggttcaattatgcattacaattagatttggtctttatatcagagtcaataggtgatattttgatactcctttcatattagtccggccaatctaagtttgagacatttatctcacgagctaatggtccaatctgtacaaaaccacatgaattttgagatatggtacataaaccaaagtattatgatcataaagtttcacaagaccacactattaatcattttaactgtgatgttgtcggagggtgaactccactagcgggggacagtgaggcccccctttgttggttcggccgggggcagcgggtgagattcgaggactcggtgagaaaggcagttagaggggtcgaaccccccgagaacgatgagacaaaaggagtttatataggttcgagccgctgaaaagcgtaataccctact

SEQ ID NO: 50709 - DNA, 617 bp, Oryza sativa
tcatcaaacgttgatgttgttactatcaatatttttttttgttctaatacaactattgaaactgtgttctcaacgtatgaaactatcttctttttctataagtttgtatatgatctggaatttttatcggaacacattattgatgtttcaattcttaatttactcaatttctgcattactgaggacctccttgaagttctgctgtctgctggaaacttcatatggcttgcgtctaccgacatatcttacgtgcattcatcacataggtgtttgcataaagatttggttggcacaggatcatgctacattgaatatcccatatgtggttgatgaattctttggttttagctttgctaattctgttacgtggaagaagttcaagggcaacaaacattttcttttgtcatgttcttgccatttcaacaattttttcattcagttctttttggtgttataccttgtaaagtcttattggcattttatttgctgtattttgaagtcattgtggtataatctcctctactacatatgctatagcgaccttatgggaaggactatgcttcttcatttcatatttgggttaggaaggctttgtgttgatagtatttttcacggct

SEQ ID NO: 50710 - DNA, 1234 bp, Oryza sativa
ggcgatgtggccagttggaattataggacaaaatggtcaaacacatgtaacaacaacatagaaggagggaggagctgaaaagaggaagcgacggcgacgatgcgtggttgtgcatgccctccctagccgtgcatgtgagcaggtggctagagtgtccgctgctttgctcctttgtacgtgggagcttggatgtgtggagatgggggatatgattcatttaagtaagccattcggagagcattgcgtgagctagttgctatcttctccggaatatgtttatatatatttcacaaaacaacaacataatgtgtaataaattgaaataaaccatcgcacttaaatttcaaccaaacccgaagtcggatcgagctcttcctttaactgtagtatcaccttcctgctttcttatttcttccgttgtggaggaggattttgatgttttatccatgttatccagagttttatcaaaccacttttacgtcattcaaagttgatctgttgatgatggatagtaacagagagtatgatcaaagaaaaaaaaatctgaagcttaatttactagtagctttctttcttggttttttagctttattctttttcaatattcggttataaggctgccttaaagtacatccatttatatatccatgtgtggatttgggaaatttaactatttgccacttttatgaaagataactctccaaataccatttttatgattgcctttatacatttgccataggagagagacaagtccataattctttgccactttggatgacgtggagcaccagctcgcatgccagcatggaaggcagtggtgaattgtttgttttgcctctgtgggctccacatgtcagcccattctctctcctcactccatctctctattttcaagtttcatccatcgtactaagggccatttatacccatcatcttaaaaaaattatatacaaaccaaacaaaagtcacttaaacttttgctgtagggccgttttattccatgacatttcatagtatccaaacaagttccaactattgttatgcaacttttcattggaaaaaaatcacaaggagatgtcatactatccttgcatgaatattcacctgtttttcttttatgactacattaagccacttgagttacaaactttcgatacttgtttgacagtacgatacaattttattttagctaattgcgtcggaaaatatggatacgttgtaagttgtaaca

SEQ ID NO: 50711 - DNA, 658 bp, Oryza sativa
tgctagcatggcttccagctacaaggatacttctagctttctttggtagaggcaggaattgttgattgggagagttgccgttttttaatagaacaagtgatttcctgacggcttctctagccaaatctctgtgctcctgttaaattagttactcatttacttggatgatttccaaacttgtcaattgtgtagagtaattttcacgaaactacagatactttgatcaaattatcagaaaactacagatttaacttgatacatcacaaaactacagatttaacactaaatttatcacaaaactacaaatttaaggtagaatatcacaaaactacagatttagtaacaaagttatcacaaaactacaggtttaatgataatttaatcacaaaatttaaaacaattataagtccaacataacattagtgctaaggatttaaaccccaaaatttgtagttttgtgataataattttattattaaatctgtagttttgcgatacttagccttaaacttatagttgtgtgataaatttattgttaaatatgtagttctgtgttacatcactttaaatctatggttttgtgataatttaaccaaagtatttgtagttttgtgaaatttactctgtggagtatacagcatgttgtagtattcaacct

SEQ ID NO: 50712 - DNA, 1035 bp, Oryza sativa
ttgcgagtatgctggtaatgcaactctttcccctctactccgtataaattataaaatgatctgtaaaatttatcacaccataaatgctccatgccaaatttgccttgttattgcaccagtgaatcgtaatgaggaaagcgatgtcatatgttaattcttttaccgaaagttgttgatttcgtttcatccttctatatccattagaaatggcggtgtagaaagatattacagaaaatgaatggtttgggagatgcctctgcgttcctatgcagctgggctctggttgcatctcaacatggcatagtagtgctatatatctctctccttgtattttaggtggttgtgttgttgtgttgttgctattcgatcatttcaacgcatcaaggaaatgagacaactcaataattagttgctcagagtgcagctcttttcttctcatatggatagcccatgttccattattttctacaacaaagataggttttaacattccttttatacatataatcctagttcttagagggcaagctcttactaatgtacccaggaattcatgtcaagagcatttgcagtcaggcatcataggagattaaagaatcatgcattttgggtgtaaatgtggttggaaataggtatcagtatacataattaaggttatagatttagactaagaaatatcaagtttccggcttatcggaacacaatagttcagacatgcaccggcaatacagctttgcaagaggtcacatggggatttacaattgccttgtcattatttgtgtactttgttgttaagaaaactgtagtttggaaatgaacaccctgggtcattgaagattgttgtgactgctcatcatctttatcaccttgccaaattcttatgcggttgccataggcttactcatgctttccatcagtattcattaggattaaagtgtcattcttttactaaaactgtaatatgctcattatttgtgctttactagcatttgaattcttttctgggtagggaagatttgcactgcaaattgttta

SEQ ID NO: 50713 - DNA, 509 bp, Oryza sativa
agtcataaatcaagaacaaattcatgtcccaaacccaaactgacacaaataatattgacccctatgaaaaattccgttcttctgattcgaaactccattacgcgagacgacaggtatctctcctgcaagggcagctctccgtcctggagtctcagctcttcaacctgcgggtggccttggcgagcgcgcaccccgacacgccgccgcagcacttcgtcgtgctgcagccggcgcactccgcggcgtccacgctgaaccaggtggtggtgaactacgacgacctcccgcacgccgtggatttcatggacgcggagcccgccgcgctgaggggactagagtctctccagctctcgcagccactgcagcgggaggaagacgagggccaccgagacatgaacctcttctcggacagtgtaggacaacggcagctgtaaaattacctgtgcaattgcatgattaggtgtctctgtggctagtacattcactcttgagttggaccacattgtgtg

SEQ ID NO: 50714 - DNA, 525 bp, Oryza sativa
tcatgttgatggtggcatgaaatatgttttgtccttttttggctctatgcagtcatctgttgacaaattggcttttttttaaaggtatatatattctatatccgcccttattttgtaaagttgttaggaaagtactctatttgcatatgtgatttaactgtcgcatatgcaaattcatggaaaaatcacatcagttcatgcacgattttctatattgtttgcaaacaaactttcctagtacatgttttcctaaatgacttatttgtccattttgtgtcttacgagttgtttccaatatatgtagcatggttgaagtatctacggagtatcacctattgacctgtccaaacattgcaatagtgcaaccgtggcatcgttctttaggtggtattggaatctacaagagataaagataaaaatgaagatgaagattaagattaagtgatttacgtaaaacgaggtaataataacgtgtgactaattgggttttaattattacaaacttaaaaaataaattaatctgat

SEQ ID NO: 50715 - DNA, 822 bp, Oryza sativa
aaagttggggaaagtgacatcggttacgtaaactaaatgagttataggaaattcatctaacagctaggattttagttatatgaaagttgtcagccaagatcttggtagtaaaataaatcaagaatcaagaatatttcaattaacttaaacattacatgacatcccatacaaataaatgtgatagaaaaaattcaaaaatatttacttgaattatataatccaagatattaggttatgttaggcatccccataattgcaattctgactagtcgcggatatatacgaatctatagtatgtacaactgtatattatcctttatagttcatcccaatagttattatcctttttattttttattacacaagatgtgcacatgcgccactatgaagcacatcacactcacaaacctgcgagtgcagccctaacacatgctgagggtaaatcaactggctagattttttttatggtggaatcaacttcacccggcttcaaatcttaaatttgatatggtgctcgtatttacggtaaattattctttaagtggcaggcgacgtactcatcgacaacgagacggcaatagtgacttcgtcaatctaaagatataccggtctagtctttcgaagatacttatagaggtagagtgtgtgtatgttcataaaatccactggtggtgaaaccatctttactcccggttgggaaccccctttaatcctggttttccaaccgggagtaaagatccgggactaaagatggacgtctttagtcccggttatgcggttgttaccaccaaccgggactaaagagaggggatctttagtccc

SEQ ID NO: 50716 - DNA, 1508 bp, Oryza sativa
atttcattttaagcacatcgggcataaattctatttgttgtgttaaaaacgaaatagttgactttatggtcttagaacctactacattggagagcaaataaaataaataccatgtcaattttgcttaaaaaaatgagccatatttttcatgatttcagtcacatgttttcaccatatgattgctaacataacactcatgtaagtatttcttgactttcgttttcatcttttttttatttatgtgttattttgcactagcatgtcttaaggaatcaagtactcccttcatcccaaaatataagaagttagtactattaatctggacagccccttatccatattcatagaagtgtcccatctaatactagctagagattattatattttgagacggaaggagttgtaggtaattaattgcccccccccccctccccgtttatagcgagtactaagaaaaagttgcagcataagatttgtaatttgcagtgtataaacatatgaattgacagtgtatgtaagacacatgttaaaataactttaccgcttcgatgaaaattcatctaaataagagagaatctattttatatcacaatgatttgccatgcatcgactttatctccctctataatatgctactgactttatcaattttttctacaatataacattagggtggaaacttttcaagaaatgaataaaatatcctttaagtcatacaagggtattgattgacctacttgaagttttgaataattatgaaagttcttttttacatagacttcttacaaaatatagacatttgtgtgcatttcaagattatgtatattacttagtagtattttaatacatgcaaaataaaattttaaaatatacacatgcttttatattatgtaagaaggctatataatttttttttatattttttaagacttatagcaggtcaaccaatagtcaactcttgtaagtcttgaagagcattttaggttttttttaaagagggagactacagaacggtatatcgttccaacggaacagttgttgtcagcatgacatcagcagataccatgtatgtactagatatgacaccctgtaggtatcagatctagtatcaagataccatgctgacgtcagtatgatatcgtaggtatcagatcaggtacctttgataccagacatgataccctgtaggtatcagatctggtatctaggttctatgctaacatcgtcatggtatttctaagaccagatatgatgccttgtaggtattagatcagatatcacatcagctattccattgcaacggtatatcattatgtagtatttctattttcaaaggtatccatctcaatagcatattataaaataattgataaactcagtggcatattataaagggaaacaagatagatggtaaatcgttgatctaaagtaaactcagtctcatgcaataaattctctctcagaaaagaaactggtgtacatgtagccagggctagctaggggagatg

SEQ ID NO: 50717 - DNA, 521 bp, Oryza sativa
cttaaacaccgtaataataagttaacaaccacaactaagacatggcctaggctcaccacccttggccatataggcgaaggggcaaaggaagggcccctctggctggccatgcagcacggccgtgcaccacaacgtcacaggcagccggccgcagcaatcctccatcctcacctccacctccagcgacacgcgctcgcgccgccgccgctggctctccatgcgctcgtacagctcgccgggtatccccaccccgtcgctggtcgccacgatcggcacggagccgaccgcctgccccggcacgcagaacccgcccgggaggtcggcgtgcgcgagctgcacgccagcgtacgacaccgccgcgctggcccggccggcgcagaacgcgcggcgcgtggcctcgttgtcgacgcggagggtgagttgaagacgggcgccgctgccggcgcgccggccctctcgagcccctcgatgccgggcaccttcacccagaagtcgggcttccggtagccgtacatgctgtt

SEQ ID NO: 50718 - DNA, 724 bp, Oryza sativa
tcctatatgaaggaaggttccaccgaaaaatccaaggaacaaagaaatgcgggggattttttttttatttttttccgcacggaagatggcactcaccggagggagggggaggcggcggcagcgggagggaggagaggtggtcgaaggcggccttggcggcgatgttgtgcgcctccttggccgaccgcgcggcgtcttccggcgtgcggaactccacgccgttgacggagacggtggcgccgaagagcggggcgtgggcggggcccgcgcaccggtgggtgtactccggcggcgcccaccgccgctgctggcacagctcctgcagccgcgacttgtacatcctcgcggtcgcggcgatcaaatcgagagctctcccgtacgaatttttgattggatggggtttgggttcggtggcgttcctctcgcctcgatccccctccctttttagccttcacgacggagtagtgcctttctttggtcccctgcactggacttggactgagcccacgagatctcatctattaaaacttccagtactttgatagtgtgggagccgaatcctctgcatttagttgtagcttctgcagaggaacctatattatgcacataagttttctcgtatacataggaggtgttctctcaaaaatataaaaatataagtccctcttctagggatttatggttttgtgtgtctctcccaaacacccccatattatgcacatca

SEQ ID NO: 50719 - DNA, 2507 bp, Oryza sativa
caatcaaatcagaccatgttcttgagcgttattgattagggtactttttatatccttgataaaggggccgggtgtttacataggggtgtaaagttttcgcgtgtcatatcgggtattatacagggtgtcgcatgaggtgttcgggcactaataataaaaaactaattgcaggatctgtcagtaaaccgcgagacgaatttattaagcctaattagtccatcattagcaaatatttactgtagcaccacattatcaaatcatgaagcaattaggcttaaaagattcatctcgcaaattagtcgcaatctgtgcaattagttattttttagcctatatttaatatttcatgcaggtgttcaaacgttcgatgtgacatggtgaaaaattttagggtaggatctaaacaggtccaaagtactggaaggtatcatattttttagtgtaaaatttggtacttccagatacttaaataccttgagataaaaaaaattagtgtaaaaatttaggtacctcaggatacttttttaaggatcgtaaaattttgcaacttgttttaattttttttctaacccaaaattttcaattacatttgaccaagctaatagcaatatttacaacacaagagtagtttcattaaatctaatattgaatatattttgatattttctttgttcagcattataagatgttttggtttaaatagattcatgcatgaatgtatgcatgtgtccaaatttatatggatgttaattagtcactctagacaagggttggagatgccaaaaaatcttatatataatgtgtaacaaagggagtagaatgtttgttttgtgtcaaaaatatttttatgttttttttaaaaaaataattatttttttaaaaaaaataaagaaaaacaacttataatatgaaataggaggagtaatttaaattgttaattctccccattatttttggcagccccacatatataatatgtaatatgtatgcatgtatattttttttaagtagctgtatacaactatacaagctggccttgttgaaaggggttatacgatttctcaatcatggacgacgtgcttgaccatcatcaatcacatgatagtttctcgttatctgtttgcctagttgcctgtgctagctttaagtcaagctcacacttgaatttatagtatactggtattacacttcttcctcctgatcccatgttaaaattaatgttctttatccggtttgctcctattaactgttttgtgcaagcagcagaatccatgagagcatcctactcgtgataacaaggtgatgagaggaatttattatatatatattctccccggcaaatctgaacactgaagtaagccaacagtgtattatgctaagccctggctgttgggttgggcttaattatcaaattagttggcccaacaaccatgcatgcatagacttgtgtacttccttatcacctagactttgccatatatagatttgatattttttttactaaattccaaactgaactttcaagttaacttttaatattttcaaaaatcagaatatagaagtgcaaatttacattttcaaaattggatgggatggagtttcaaaaataaaaaaaaaatggatgagatggtacacaatacaattaagtaatggtgccaattaaaaacaattaatactgccaacaaaagcacagtaaaaaaaactatggatgtataccttttgccttgatctccctatgatggtgcttctaccactcatgaaaatttttaaaatatttaataagacaaggtatggcatcttgcaagatgtcaaaacataacttaattcaatcacgagaagtaacccaaaaataaaaggaaacaatttagtatatttgtgtttcttctaaaacaagtctatgagatgttgaaaattttgatgatgaacaagagaatttgtttggagctagttatatatagatgcgtgcgatatatatgtagtcatcaagactcttcaagatctggtgcaaattaatctatcgattggctttatttactagcagagtcaatggaacagtacttgtcttcaacagagtgggtgaagattgatggtgcttccttaattaacttaggctttaattatttgttttgttctgctgcttccatgcattatgttagcccataatgcatggaaaaaaaacttacccttttaatatgaaatggatcacattttttgacctatatatgttgttaggcacccggttagcttagagatgaaaattattgtagtttgttttaaaacttgaattaatcttaaatcaaaatatgttgctaggccttttatatataaaaaaaaggaaatatgttacccaaatgccatttctttgatcgtgttgattcatacttttgaaacataatagtattatcggttgcgacgaagattacgagagaaacattgctccgaacacataaataccatattccaccgaaatacaaagaaaaccgtgacatgggtggcttgtcacactc

SEQ ID NO: 50720 - DNA, 703 bp, Oryza sativa
attcctgcagcccttacaaaactaatttaataaataaaagctaattcgcgagacaaattttttaatcctaattaatccataattagagaatgtttactgtagcatcacatagactaatcatggattaattaggctcaatagattcatctcgcgaattagtccaagattatagatgggttttattaatagtctacgtttaatatttataattagtatccaagcatccgatgtgatagggaattaaaagttttagtccgatctaaacagggcctgacttacattacaagccaagcaaggatgaccgtgaaatagcaaaaaaaaaaaaaaaaaaaaaaaaaaaaagggtgacggtgagtaaagaacaatcggccgttgatttttcaagaaacgcacagccgttggattagatgaacaacttctaccttctacctgtacaacacatggggagaggggagaccccatgcctctcttgcctgccttttaattgctggattatggttcaattcaaggctgttggttggtactctctgccacttctataaataataaaacaaaaaaaaaacacagtttgttttttttttttttgtgaatcctatgacaatatatgccaaattatcaaatttataacaatccacaaaaagaacggcgagaaattcgcatggattgctagatcaccaagccatcgatcaagctggcagagcaa

SEQ ID NO: 50721 - DNA, 558 bp, Oryza sativa
tttatgttgtccatgtcacattttctgacatcagggccttcgtctccttgtcgtcttcgtctgcaagcagcaagcctacgccggaggctagccagcgagctccgggaaggctagatggtggtcgtggatggcgacgactccacgcggtggtcgtggacggtcgaagagggagccaaaggagatgagcgcgaggagatcctcgacagacaaatcggcgctggagaaggagggcacagcgatagatgggggaggggcgggacaggaggagagctcctcagcgagggcagcggcgagcaggacgcgcatccgctcgagctcatcgatgagcgtgatgatgacaggttgggatctctgcctagatctggtgagagagaagccaccaccgagctaccgaggtcccgccatggctcatccgtcccgccgctcgctcgtcgcttgtcagtgcgggaagaggcggtgagggtggtggttgctcgtggagcatcgatgggctggagcatgggggcatggtagtggcgacgcgcgacgacgaggagctgctgtccaggcgcgacgacg

SEQ ID NO: 50722 - DNA, 3022 bp, Oryza sativa
agggattttttttctcgaagaggcaccagacatatgatatactttgtattaagtagtaactattaatttataaagctgaggcatggacaataaacacgggttcatacaacgtcttccgtcttttttaatcatgctataaattcaatgttgctgtaagaaaatactacattgtcatacactatacatctccataggtatcatgaggtcgttttccttgaaatcaaaattttaaaaaaatgtcaaagctacaaaaattcttcattgcggacaaaacgttatttcccattgaacaaagtcaatgcaagatcgaacttagattcaaagatggcacctataggaatatattgagcaatgctatcaacatccatcttacctccattatataaaaaaaaacatccatcttacctcaagaaagcacattactaacaagttgtcttttggtggaagatgaatttaacaaaatcatatgtcaatgttggtgaaaagaaaacaaatttgtacatagtggtccaaaaataaaagaagaggaaaacaatacattattttaaagtatcccttccctacccacccatcaatactactactgtttttctattaataagagaaactttgaaatttttttctccatttcatttattgtgggaaagagggagtacatttaagtacatactccctctatctaaaattttattttccattttttttctaaaggagatgttcatattggtagtcgtcatgcatccaagacttaaatgaagatattgtctctttgtttcgccgtgctagattaaattgctaacaagaatctaatcaaccatcttaatactcgttggttgcatgtgttcatttttttttatctttgttacatgcaaataatttgatttattggttttgatgacaaaagaactatgccttagagttttggacggagggaatacatcacaatttcggtgggctcacaagattttactccagtttttcctagttggcttaaactatataaagtatggatcccatgtcgtatgtacctgatttcaacctcacgttcgagctagctattattgtcatcgttgtctttagtgcaaaagatacttaatttgtagatcatggatatataaaaggctaaaaatgaacttatttgctggagagaagaaaataaactctaaaaatcaatttattttgagacggatggatttagcttgtgtgtaacaccatggtgagcacgagcctcatagcataccatcccccaattaagtgaacatcataatttgaaccgatgatgtgccatgcatgccatcccccaagtgactatcgtcaccatccagccatccagattccagagacaatcatctctttcttctcaacattaacaatatattgggccggccggtgtacttatccagaccacctagccctatccacgttctccaaaaaaaaaaaacctagccctatacactaaaacatagaagaatacatcaggtgctttccatttccaccacctctctgcgtcaggccctggacgtcagcacaggcagcgtgagcggcgtgacgtacgctccctcatcgtcgtccacccggcagccgcgcgtgaggtttttgcagcgaaaacaataggtttttccccggtttgtgcttgactcttaacggtatccgtcatatcaggtgtggccttttgatttttgatactggtgaacgggcgttctacgcgctcgtacgtggtgatcgatatacgcaaagcgcgtcgttcgtccccgacagccaccacatggtttcacactactctactcgactccgtttggatgagcttttgcggaatctgggcagcaacagcaacgagctggaaagcatctttaatttttctgaggtgcgtcaatggcggcagattcaccggatctagcaggcggaggccaagtggatagatatgagccgaggacaagtacgtacagtgcctgctgctatttggttcgtgttgggtttttctcgaactacgtattccaaccaccggttgcattccacggttgacacgtatggagtatgaacatctatcaatcaatcaatctattctattatattattaagtcagctcgaaaataagtcaccacgtttactggggaggctagaaattcccacgttaatggaagaaaaagaaaagaagagtccaagtagaaatacaatctaaaaatagctgaaattcggaattaaaatatacaatatgaaaagagaagtccatataggaacccaatacgtgattaattaaaattcgggataataataaaataaatatcaaaattagaaaaagaaaaaagaagagtttgagtaggaatacaatttataaataactgaaattcagaattaaaaataagaaatattgaaagaagagtccatacaagaatctaatacgagattaattaaaattcggaataaaagataaaaaaaatcaaaattagaaaaaagaaaagaaaataagagtttaagtagtaatacaatttaaaattaacttaaattcagaattaaatataaacaatattgaaataagagtacatataagaacccaatagcagattaattaaaatttataataataaataaataaataatctgaaattaggcaaattaaaagagagagttaaagtaggaatacaattttgaaacaacagagattgaaaataaaaaaaataaaaatatcaaaagaacataataataaataaaataaattctgaaattagaaaaagaaaaaaaaattcaactaggagtacaatttataaataactaaaataggtgataaaaaataagactattgaaagaaaagaccatctaaaacatatgacgagattaattaagtaacaatcctatagaggagcaaagtggtggcggttgatgaacttctagaaagtaaaaaaataaaccccaatgataatcatatttgatttttaaaatctcaattacaataaaaatgagaggcagcgggcgggtcgtgtaggagtacaatggtagagccgccgatgattggtgggttttctag

SEQ ID NO: 50723 - DNA, 1228 bp, Oryza sativa
ttttcgttaaattctctctcccggttgtattgccttgctatcgacctctcatgtactttatttaaatatttaggttcgtagctaattttttttttgacacccgtagctaaaaattgatggtgaaggggagtaaactttttcttcacctcgctctttcagtgcgttggtcatcgcaaggtacatgtctagattcactcaccgtcatgcacgcgccactatcaaaatggagatcattgatagctgcatcagctgcctatcaattaatctctcatttttaaatctgaccaaattaaagctcacgggcaaaagtatatattacacacatactgacatgtggggacaccacaccagtggcaataatcagcttgtaagaatacgtacttcgttatattactaattaattactctcttatcctccactaataaagttgtcatcttgacttccttgcacacagcatgcatcaccgtcacatctcagttaaaaaaaagtccagcaaattgagtgccaggtcgccatcagacgatgcaaaagttcccggacagagcatgaatttttcttcatggaaaagatcttctccccactccatggccgccggccgggcaagtgctcatcgatcgatcaagtggggccatatgagcccatgacgcaattacgaggcagcggcggcgacagtacgctgaagcagggtttacgaaaccttttcattttttaaaccacggtcggtatcgtggaatagcggtaacccgattctaaacgatttagtaaacactacattagagtgcgggacgaaggcccagaggacgaacaggttgcagacccgtggatccgaggaaagtttttcgaggtcttagactcttaggttatcaggtcaagtatagctgtccattctaaaataaactaatttctaccttcctatctatcatgagtctataaatcgataaattttgttcttccaatatctctcatatagcctttcactaatataattttgctattagactgaactattttggtcatttcttttcctacttaactctaattgaaaagttaggatttaaggatttatgttccttagagggagtatatagctgaaattaactgattgatagataatttgatttctaatagctatttgacgatataagtaaataaaataactactctgaagtgaaaatgttgttttagaaaagtattttaagattttatttttttttacaaaacacgttg

SEQ ID NO: 50724 - DNA, 4213 bp, Oryza sativa
ttcccgccaaatctggacttcgatttgggctctcgatcgactctggattttcggtttttggggtttctgtgggctgttcgttcggtgatggacggcccagtttcatcaagccggccggcccactatttgtatcaagagatgggcccaacccaaatagcccattacgcgcgcaacgacggccacgacgacggttgccggcgcgcgccgcggggttgcgtcgtcgtcgtcgtcgtcgtcgtcggcggcggcggcggatccttttttatattttccggcgtgaaggcagagctcgggcaagcacgaggggtccccggaggcgctggtacgtacgcgctttcctcccctgcgccatcgtcttaatttgtcctctctgagctcaccgaacgcatcgtccgcttgatcttcccatatcccgtggtgggtgatgccggtcgtcggctcgtcgcgatagggagtttgctgtggtaggggattcttctagggtttttgtagtctggaactcggtgtaggatttgcgctatctgagcattggtgccggcaaccccacgcgtgcatgctaggtgttcggggaaattccgatcaggcctacgttttacaatgcatctctgcggcggtgattactcagtggtaagctgatttctcagtgattgcacggtgatcttctggcctcacagtgcagtgcagtcttcatggatgccgactgacctggcatgacattgaaactgatctggtggtcatctcggactgggagacagggagatcactcgaccgctcttttttgtgggcttttgctcagtgctcactcatgcagtcacacggcactgtggaaacccatgataatgcagcaagtaatggttcagtgtccctccaaggaaagttgcatcattgtttggtcctgcggtttagaaaaggaagagaaaatccttgatatgctgtgtttggtcaagtttattgttgctacttgctgcctttgttgtaaagtttgcaatatttcttttagactggtaaagtttgcaatattctcgatgcttttgccaattgaaacttatttatattctcaaagtcagtatggtgtgcttctcggtccatctgcagactgcagggctgtgtttggtggtgttgtgtagactgtagtggatgtctcgggtatttttgcttacaaccagtccccattgacgttgagactctgcttctatggtttgtcattgaagtcttttttttcctagtggctgtcaacatgtacttcagcattgttgatcttctgagtttgcatttgaatgtaaggtaaaaattgattaagttggtcctgtttacttttttggactggaactggattgggtaactttttttcttgaatccctcatagtcaataaaaactccacagtccacagggttggcgaactgccagtagtgagctggttgtgtggtttattgcagcttgagaggcaagagcaacgtagatatagtggttgatggttggaaaactgtcacaattacatggctttggacaacattgccatgcatgaccatctgaaactctggatttctcatgcctcacataagcttcttcttgaaccagtgttacgttggtgtaacatatcccctttccttcttttcattctgttattgaatgccaaccttttggatcgctgagtgaaatatataatttaggtgggttggtgccttgctaaaaattctaaagttgggaaagtgaaatggcacacaagcacaaatgattaatgtctcatttcaaggaaactggtacttgaaggtgccatcatttttcagctagatcatccatcaaacaacagctaagatgtcgcttttgctttttcctttccggtgaaaaaatatggtctaagtcttcctgcctttgacatatttaagtttggtgaagtacttcctttgttctcaatgattgaggctgtagttttgcagtactgcaaatttctaaggcttcccaagtacaatccaggatccatcatttgttaatcaatttaacatctggaaacagatagaagcaagcactacaggaatgctgttataataagacacgtttacaagtacagcactaaccatatgatgtcattattttagggttttatgatagttttcaccatgttatgtgttagaagaatacataagttcactgtcttttggttggctattgagcacaaaatatgaaggccccctgacaaattaggaccttatcctctcctcctgtagctgacagtttttcggttccagtaatcagatggaaacaatgcaggtccatgacatccacagcgctagcactgctgcctgcacttgtattattttctacccctgtagttgagaggacaaaaatgatacggctgattgcattgtcgtccaatacagacagttttgcaagtgcaggaccatgcattatcgatgggaggacggtgatcagggaacgcatggcatgtgcagacgggcttgactgcatgttacatgtatcctccccagaagtttgacatgaggagccagcagttcttccactgataactgatgaacgaagattcccagtcatctgcatcagcaggtatttgttttgtttaatacgtagattactgcataattagttgtgaaactggatagattagatgcgctatacaattgactgactataacatcctctccattttataatacccggttcgaaactttgacagctaatgcatcattcacaaaaaaagaaaaagaagaacagactcatgtgatacaaatctgctccagttatttcctctgttcctattactgttccaaaattactgcttaatgcgttagaaaatcgcgataaattaatcaagatccttttcaatgttgcagcagatgaaccgaactgtgagctgcacagatggagccatggagagcactgcatctgggtcaatcaacaattatgaacgtttctcccttccattcgctctgccctcatctgaagaggaccacagcacctaacgaccgagatgatgaactgtggactggagagcaccacacacccctcccggatttcctggcgaggtgatgagcagatgaagcttggcgatgcagcggcggcaggcactgctctgcgcgtgaactgcagccgtgcaggaggagccagatcccggcacagtgctgggcaggcagtgccccccccacaccatatgcccggctcctgggcgatgatgcagcaactaccggggtcgccatcgcccaaccgaacgtctcgccggtgccctcccgcccccggccgagatatgcagccaccaacctacggtgtgcgcccgaaagtgaccacatcttgccatgatgggtctggatggccctccccttccataattttcacatttgcacacccagaaatgagtggtagttcgttttcgtttgacatgttaagaagatgcttagcttaagctttttgggtgaaccggtcgatgatatagattaacgtcgaaatggaacatcaataaaatatggatgtaaattgagtcatggttttataaatgagtgatagttcgttttcatttgacatgttaagaatatgcgagcttaaacttttgggtgaactggtcgataaaatatattaacgtcaaaatggaacatcaataaaatatgggtgtaaattgagtcatggttttgtaatggaggaacatctatgggactcctccatttgtaattttttggcattgtaattttgtcagagcatgagcttgggaaggaaattccttttgtcagtgtaatccagtgcataatacaccagcactgtccaccatatgcagatggtttcaactcgggttggggccacatgtacattattgttggtagtgctgtactgttcagtgtacatgaccatcctcgcaagtactctgcaatttgccaagatctgaagatctggagttctggacctcatgttcggtacactgttcgtgtttttgtacactgtgcctccttaatttccctgattactccctaacacaaagctgctttaccacttttgcacgggttcttaaactttaaaaccgtccaatcgtacggcaaaaaaagatgtatcaggtggggtggaacactacgaatacaattagtgaagtacaattgacaacctagaaaaaatgtggcagaaattagcccacggctcggatcggatcagatgagatgagatctccttgttctttgatccaggctagatccaaccccaacatgaaagagagta

SEQ ID NO: 50725 - DNA, 1750 bp, Oryza sativa
ttcgaaattccaacttttttatcacatcaaaactttcctacacacaaacttttaacttttccgtcacatcattccaatttcaaccaaacttccaattttagcgtgaactaaacacacccgaagacgaagatggtgatgaagattaattttttttatgtaaaacgagttggtattaacatattattgattgagttttaattattataaatttaaaaaatagcttaatatgatattttagagcaactttcatatagaaagttttcgcacaaaacgtattgtttagcaatttgaaaaatgtgctacgaaaatcttaatcttcatccactcttgttggataaaagaacgggaccttagtttgatttgataccatatcacaacactagctaaacgtacaacataccccccaaaaaagtatttttcttaaaaaaattacaagcatgttaaagattgaatatggaatcatatgattaaaactacatatcaagtgtatctataaaagtaccacactctttacaacaactaaattttgtgccacataattcatgacaacacgctgcaaaatgtttggtaaagcaataatgaatcgtggtatatatccaactaattaaacaggccctaatataccaacctctgtaaaccataaaaggcaatgctggaagcatggtttttgaggatttctatcacctccggtcgcccactcggacgatctgatgatgggcttttatcacatcctacggtcttcgccatctcttatggtcttcgtcatcttcaacgttttcttcgccgtatccaatgatcttcgtcattcttgatgatattatctgtttgtcgattgaagggacgtattcgtgagtgtcttcgacgaatgatcaaatacatgtctagaaatcaataacgtcgtataaaagtagagtgagtgtttgagtattacattattgggtacccacacaaaagacggagagtaagagcatgtttagatccattcggaatggtaaatggtaaatggcaaaagttttgtcattgcaaaagtactagttggtgtttagatgcatcctaaacttttaccattctagcactttttagtatagagagagagatcccaaaacactttttagcacaatttactattatgaactagcaaatagcaaatggcaaattgctaacttttactactagtgtttaggtccaaaatagtaaaacttttactgttttggagaatctaaacagggcgtaacaaagcccagcttaattgggcacttggaaggagaaaaaaaaaagagaatctggtgtgaggttgtccatgtgctgatcgaccagtgaccacgaggtctgggtgtagatcccgttgcttgcacagagctggatgcgattgcacgcgatctctctctccctcgtcgtactgggtgcctactaacctcataattagtgcatgtttcgtggaccttttctctgtggatcggagctggatacgtactacgcgcacagcagcataccaattcgcctgtcctaacgaggacgatgtatagtaattgagcaactaatgtagcagcgattagcaggagcagtgcccagtgcacacattgatgattgatctctcgaactcaagatgtggtttaataaagtctaagtcgacaggcactccatttaaacaatgtactcgtactaactgcttatctgtcgaaaagttcagagccacagccactgcaagagtgcagtctgcagagttcagaccaagggatgtttcactggg

SEQ ID NO: 50726 - DNA, 2265 bp, Oryza sativa
  unsure (1)..(2265): unsure at all n locations
gcccgggcttcccaacccctccttccgaacacaatcttattataagtgaaagagcttattaacaatttagaaacagattcagtgttacgttttccactttattttagttattattttctatgtgatttctttctcttctctatgtaaatatgcttttatttctcatatctcctcttccaagtaaataataaactacttttaatcctggctatgtttagttcacgccaaaattggaagtttggttgaaattggaacgatgtgacggaaaagttggaagtttatgtgtatatgaaagttttgatgtgatggaaaaattggaagtttgaagaaatatttcgaaactaaacaccgcgctaattttcttacatattatgttgaaaaactacagtataaatattggatcttacaatataattatagagtaagatttataatttaccgtgtaattatagtgtaagtatataccatgtataaacgatttaactattattttaagaaaatatgacatcataaatatagctacccttatttatggataagacttttatactttttagtgatttaaaagcaaatgaaaaaaataaactacaataaaaaaacttcaaaatcaattctacattaagttttatttttttttcttaaaattcaagttctaatctgactagcgaagagcaaactagcaaaacaaaagaacagacatcgaatgaaactacacatgttgtacagcttaagtagattctgctgtaccttccagagattagtactacctccgcgccaaaataagtgcagccatgagtttccacgtccaactttgatcgtccgtcttatttgaattttttttataattagcaattttgttgttataagatgataaaacatgaatagtactttactcgtgacttatgtttttaatttttttaaaaaatttttcaaataagacgaatgattaaagttgagcgctganaaccatagctgcacttattttagacggaggaagtagggtgaaaaagtgaatgagtactaatggggccatttaaagggccggaattttttaataagggtaccttaatattcaggccccggtttaataagggggttattaaagaccttttttattcataagaaagccctccttagagaacttttttcaaatcaacttatccatctaatactccctccattccaaatttatatatatatatatatatatatatatatatatatatatatatatataatttttttaggttatttctaaataatctacatatttgtgtttatttattaattctatttgttattttgtgtattggagtaaatggacattgatgcatccatgcatacaaatatttataatctacatgcaatatcttaatttgctattggctaggaaatagtgggaatgatgcatgcattgagtttgttgttagagtaaatatagtatgagaaagttattagcttttttttggtcttggtatacctatgaaatatatagatcaatttaaaatggagggagtaatacttatcataaactctttcttagaaaaaagtttaataataaactcactttcatccgtcttccatcgtcattcacattcagcgaacgtgttcgcaagctattgctgcaacaacggctggagctgcaacaaaaatgtctatcttgaattactgcagcctcaacggttgcgacaaccctcaccgccgatcataacaagaacttcaaaacgatcatagctgtgttcttctctcagcttttttaaccccggccctacactttcgtttttattcgttttttaggtacacgcttcccaaactattaaatagtattttttttaaaaaaaagtctaagaaacattatttttgaaaataatattaatctatattttttaaaaaagcttatatttaattagttactccctccggttttattttaattgacgctttggacaatgacatactctacaagatatacctttaaccttatttttctattataatatatacaataaattaatgcatgtttacttttattatagtgttttgaaagacaaatctatatatgtttttctagtttcttgaaactaaatatttttaaagttattgatggtcaaagttataaaagtttaacctcaaccttgtccaaaacgtcaattaatatagaaccagagggagtactcattccattccaaaatacaaggcacaactacttttaaaaagttgtttcataatataagatgtgcatgcatgcatgcaattaattaatac

SEQ ID NO: 50727 - DNA, 549 bp, Oryza sativa
gcaattgcgcgggtcacccagctagttatattattaaaacagctttgaaaggagtcaccacgttcgctgtgggggctagaaattcccacattaatccgagaaaaagaaaaaaaagaaaatggagagtccaagtagaagtacaatttaaaaatagctgaaattcggaattaaaaataagcaatattaaaagaaatttccatataagaacccaatacgagattaattaaaattcgaaataaaaataaaataaaatccaaaattagaaaaggaaaggagagtccaagtagaaatataatttaaaaatatttgaaattcggaattaaaaataaggaatattgaaataagtttccatataagaaccaaatacgagattaatcaaaaattgaaataaaaataaaataaaatccaaaattagaaaaggaaatgagagtccaagtaggaatacaatttaaaaatagctaaaattaggaattaaaaataaggaatattaaaagaagagtccatataagaacccaatacgagattaattaaaattcggaataaaaataa

SEQ ID NO: 50728 - DNA, 1907 bp, Oryza sativa
tttaatatttcttttttaattccgaattttctataaattgtatttctatatagactctatgctcttcttccaatattatttatttttatttctaaattttcatattatattttatatgtgtgttagttattaatcattttcaatatcaaattttagttatttgtaaattatatatattcctatatggactctagactcgtcttttaatatatttttttaattctgaattttctgtaaattgtatttttatatagactctatgctcttcttccaatattatttatttttatttctgaattttcatattatattttatatacgtattagttattaattatttttaatatcaaattttagttatttgtaaattatatatattcctatatggactctagactcgtcttttaattttttttttattctaaattttctgtaaattatatttctatatagtctctatgctcttcttccaatattatttatttttatttatgaatttttattatttctaattgtatttctatgtggactctaaactcatctttcaatattctttaatttttaatttcgaatttcagttacttctaaattgtattcctatatttgtgttcctatattgaccttaaactcttcttcccatgtttttcttaattttgaattttagttatttataaattgtatttttatacggactctaaactctacttttaattttattatgtttattccaaatttgagttagttttaaattgctatatggactctatactctacttctaatattccctattttttaattccgaatttctattttttttcttaatattatctctatatggactctatactctacttctaatatttcttatttttaattccaaatttctattatttcctaattgtatttctatatggactctatactctacttctaatatttcttatttttaattccgaatttcagttatttcctaattgtatttctatatggactatatactctacttctaatattccttatttttaattccgaatttcagttatttcctaattgtatttctatatggattctagtctcctcttctaatattccttattttttaattccgaatttaagttatttcctaattgtatttctatatggactttagtctcctcttctaatattccttattttttaatttcgaatttcaactatttctaaattgtatttctatatggactttagtctcctcttataatattccttattttttaattccgaatttcagctatttctaaattgtatttctatatggactctgccttttctttttctccaattaatgtgagaatttctaggccatgagagcgaacgtggaagctcctttttctattcctttaataatataatagataattggtgattttgtgtatgtaaaagtgtaatactactactccctccgttacagtttacaagacaagtcaactgaagctaatcagtaaccaaggaaatttggtggtctagtagtgatgtcggtcagtcttaagttgatcactaactttactttgatatattcttaagactgagctttgtactctttgcgtatgatcaaccttacctaccacaagtaggtaaggtttcgcagcagtgttctcgtgtgacatcttctccaaaataatcttgaaagtggtgtgcaaaaatgtgaacattagtctttcaagtttagcaatcaactttgactaaattaattgtgttaaccaatcaaaggaaactcatataacatatttcctcgttaatcacaaatttttttaggcaagtgaagaacaacttgcagttgcagcctctggtctacagaaaaaaacaaatcttatgatcaggtatgtgtgctgcaagggcccagctccaacggcccaatccaaatgca

SEQ ID NO: 50729 - DNA, 888 bp, Oryza sativa
cgggtgggatatttttgaccagatgaaataagttcaaagatcatccaaacatgatttttggacatattggagtgtattgggtgcgttcgtggcaaaaactcacttcgtgaatcgcgcgggtacttttgtcaattaataccaatattggcatatattgagccccacgggtgcgatgtttttggccggaatgaaaaagttcaaaaagcgccaaaacttgaattttggacatattggagtgtattgggtgcgttcgtggcaaaaactcacttcgtgaatcgcgcgggtacttttgtcaattaataccaatattggcatatgttgagaccccacgggtgcaatatttttgaccggattgaataagttcaaaaagcatccaaacatgaattttggacatattggagtgtattgggtgcgttcgtggcaaaaactcacttcgtgattcgcgcgggtacttttgtcaattaataccaatattggcatatgttgagaccccacgggtgcgatgtttttgaccggaatgaaaaagttcaaaaagcaccaaaacatgatttctggacatattggagtgtattgggtgcgttcgtggcaaaaactcacttcgtgattcgcgcgggtacttttgtcaattaataccaatattggcatatgttgagaccccacgggtgcggtgtttttgaccgcattgaataagttcaaaaagcatccaaacatgaattttggacatattggagtgtattgggtgcgttcgtggcaaaaactcacttcgtgaatcgcgcgggtacttttgtcaattaataccaatattggcatatgttgagaccccacgggtgcgatatttttgaccggaatgaaaaagttcaaaaagcaccaaatcttgaattttggaca

SEQ ID NO: 50730 - DNA, 1357 bp, Oryza sativa
ttttgtccattaataccaatattggcatattttgagaccccatgggtgcgatatttttgaccggattgaataagttaaaaaagcatccaaacatggattttggacatattggagtgtattgggtgcgttcgtggcaaaaactcacttcgtgattcgcgcgggtacttttgtcaattaataccaatattggcatatgttgagaccccacgggtgcggtgtttttgaccgcattgaataagttcaaaaagcatccaaacatgaattttggacatattggagtgtattgggtgcgttcgtggcaaaaactcacttcgtgaatcgcgcgggtacttttgtcaattaataccaatattggcatatgttgagaccccacgggtgcgatatttttgaccggaatgaaaaagttcaaaaagcaccaaaacaagatttctggacatattggagtgtattgggtgcgttcgtggcaaaaactcacttcgtgatttgcgcggttacttttgtcaattaataccaatatttggatgcgttcgtggcaaaaactcacttcgtgattcgcgcgggtacttttgtcaattaataccaatattggcatatattgagaccccacgggtgcgatatttttgaccggattgaatatgttcaaaaagcatccaaacatgaattttggacatgttggagtctattgggtgcgttcgtggcaaaaactcacttcgtgattcgcgcgggtacttttgtccattaatgccaatattggcatatattgagccccacgggtgcgatgtttttgaccggaatgaaaaagttctaaaagcaccaaaacatgaattttggacatattggagtgtattgggtgcgttcgtggcaaaaactcacttcgtgattcgcgcatgtacttttgtcaattaataccaatattggcatatgttgagaccccacgggtgcgatatttttgaccggattgaataagttcaaaaagaaccaaaacaagatttctggacatattggagtgtattgggtgcgttcgtggcaaaaactcacttcgtgattcgcgcgggtacttttgtcaattaataccaatattggcatatgttgagaccccaggggtgcgatatttttgacaggaatgaaaaagttcaaaaagcaccaaaacatgaattttggacatattggagtgtattgggtgcgtacgtggcaaaaactcacttcgtgattcgcgcgggtacttttgtcaattaataccaatattggcatatgttgagaccccacgtgtgcgaaatttttgaccggattgaataagttcaaaaagcatccaaacatgaatttggacatattggaatgcattggatgcgttcggggc

SEQ ID NO: 50731 - DNA, 929 bp, Oryza sativa
ttcctgcagcccttgacaaaaatacccgcgcgaatcacgaagtgagtttttgccacgaacgcacccaatacactccatgtgtgcagaaatcttgttttggtgctttttgaaatttttcattccggtcaaaaacatcgcacccgtggggtctcaacatatgccaatattggtattaattgacaaaagtacccgcgcgaatcacgaagtgagtttttgccacgaacgcacccaatacactccaataagtccaaaattatgttttggcgctttttgaactttttcattccggtcaaaaacatcgcacccgtggggctcaatatatgccaatattggcattaattgacaaaagtacccgcgcgaatcacgaagtgagtttttgccacgaacgcacccaatacactccaatatgtctaaaattcatgttttggtgcttttagaactttttcattccggtcaaaaacatcgcacccgtggggctcaatatatgccaatattggcattaatggacaaaagtacccgcgcgaatcacgaagtgagtttttgccacgaacgcacccaatacactccaatatgaccaaaattcatgtttggatgctttttgaacttattccatctggtcaaaaatatcgcacccgtggggtctcaacatatgccaatgttggtattaattgacaaaagtacccgcgcgaatcacgaagtgagtttttgccacgaacgcacccaatacactccgatatgtccaaaattcatgtttggatgctttttgaacttattcaatccggtcaaaaatatcgcacccgtggggtctcaacatatgccaatatcggtattaattgacaaaagttcccctcgcgattcacaaaatgagtttttgctcgaacccacccaatacactccaatttgtccaatattatgtttggatgcttttt

SEQ ID NO: 50732 - DNA, 1055 bp, Oryza sativa
gtccaaaatttatgttttgccgatttttgaattttttcattccggtcaaaaacaacgcaaccggtggggctcaatatatgccaatattggcattaattaccaaaagtactcgcgcgaagcacgaagtgagtttttgccacgaacgcacccaatacactccaatatgtccaaaattcatgttttggcgctttttgaactttttcattccggtcaaaaacatcgcacccgtggggctcaatacatgccaatattggcattaatggacaaaagtacccgcgcgaatcacgaagtgagtttttgccacgaacgcacccaatacactccaatatgaccaaaattcatgtttggatgatttttgaacttattccatctggtcaaaaatatcgcacccgtggggtctcaacatatgccaatattggtattaattgacaaaagtacccgcgcgaatcacgaagtgagtttttgccacgaacgcacccaatacactccgatatgtccaaaattcatgtttggatgctttttgaacttattcaatccggtcaaaaatatcgcacccgtggggtctcaacatatgccaatatcggtattaattgacaaaagtacccgcgcgattcacgaagtgagtttttgccacgaacgcacccaatacactccaatatgtccaaaattcaagttttggcgctttttgaactttttcattccggtcaaaaacatcgcacccgtggggctcaatatatgccaatattggcattaattgacaaaagtacccgcgcgaatcacgaagtgagtttttgccacgaacgcacccaatacactccaatatgtccaaaattcatgttttggtgctttttgaactttttcattccggtcaaaaacatcgcacccgtggggctcaatacatgccaatattggcattaatggacaaaagtacccgcgcgaatcacgaagtgagtttttgccacgaacgcacccaatacactccaatatgtccaaaattcatgtttggatgatttttgaacttattccatccggtcaaaaacttcccacccgggggg

SEQ ID NO: 50733 - DNA, 917 bp, Oryza sativa
catatgccaatattggtattaattgacaaaagtacccgcgcgattcacgaagtgagtttttgccacgaacgcacccaatacactccaatatgtccaaaattcttgtttcgatgctttttgaacttattcaatgcggtcaaaaacaccgcacccgtggggtctcaacatatgccaatattggtattaattgacaaaagtacccgcgcgaatcacgaagtgagtttttgccacgaacgcacccaatacactccaatatgtccagaaatcttgttttggtgctttttgaacttttccattccggtcaaaaatatcgcacccgtggggtctcaacatatgccaatattggtattaattgacaagagtacccgcgcgattcacgaagtgagtttttgccacgaacgcacccaatacactccaatatgtccaaaattcatgtttggatgctttttgaacttattcaatgcggtcaaaaacaccgcacccgtggggtctcaacatatgccaatattggtattaattgacaaaagtacccgcgcgaatcacgaagtgagtttttgccacgaacgcacccaatacactccaatatgtccagaaatcttgttttggtgctttttgaactttttcattccggtcaaaaacatcgcacccgtggggtctcaacatatgccaatattggtattaattgacaaaagtacccgcgcgaatcacgaagtgagtttttgccacgaacgcacccaatacactccaatatgtccaaaattcatgtttggatgctttttgaacttattcaatgcggtcaaaaacaccgcacccgtggggtctcaacatatgccaatattggtattaattgacaaaagtacccgcgcgaatcacgaagtgagtttttgccacgaacgcacccaatacactccaatatg

SEQ ID NO: 50734 - DNA, 1233 bp, Oryza sativa
cggggactttttgtcaaattaagcccaatattgccatatattgagcccccacgggggggaatgtttttgacgggaataaaaagttccaaaagcaccaaaacaagaattttagacatattggagtgtattgggtgcgttcgtggcaaaaactcactacgtgattcgggcgggaacttttgtcaattaataccaatattggcatatgttgagaccccacgggtgcgatgtttttgaccggaatgaaaaagttcaaaaagcaccaaaacatgaattttggacatattggagtgtattgggtgcgttcgtggcaaaaactcacttcgtgattcgcgcgggtacttttgtcaattaatgccaatattggcatatgttgagaccccacgggtgcgatgtttttgaccggaatgaaaaagctcaaaaagcaccaaaacatgaattttggacatattggagtgtatagggtgcgttcgtggcaaaaactcacttcgtgattcgcgcgggtacttttgtcaattaataccaatattggcatatgttgagaccccacgggtgcgatgtttttgaccggattgaataagttcaaaaagcatccaaacatgaattttggacatattggagtgtattgggtgcgttcgtggcaaaaactcacttcgtgactcgcgcgggtacttttgtcaattaataccaatattggcatatgttgagaccccacgggtgcgatatttttgaccggattgaataagttcaaaaagcatccaaacatgaattttggacatattggagtgtattgggtgcgttcgtggcaaaaactcacttcgtgaatcgcgcgggtactcttgtcaattagtaccaatattggcatatgttgagaccccacgggtgcgatatttttgaccggattgaataagttcaaaaagcatccaaacatgaattttggacatattggagtgtattgggtgcgttcgtggcaaaaactcacatcgtgattcgcgcgggtacttttgtcaattaataccaatattggcatatgttgagaccccacgggtgcgatatttttgaccggattgaataagttcaaaaagcatccaaacatgaattttggacatattggagtgtattgggtgcgttcgtggcaaaaactcactttgtgattcgcgcgggtacttttgtcaattaatgccaatattggcatatattgagccccacgggtgcgatgtttttgaccggaatgaa

SEQ ID NO: 50735 - DNA, 724 bp, Oryza sativa
tcgcctaacactaagaccagcaaattaacaccaccgatgccatccaaaactcaaccagccttaactaagcagtactagtgaaaaggcacaatggtctataggatcacggaaaaactaatctactatttttttttgttggtcttttctggactataggaaaaaaaaataataatgacgaagggaagggtaaattcttcaccgatgaaccacgctctgataccacctgatgcgaacccgctagggtttgtggcccgatctttcgatgagaggtaagggataactcgattagatgaagtcgacgttcacggcccgactacaactgtccaaagacgctgcgccttagcaaccgatacaccgtctccaatggtcgccgcgaacttgtggtgcgcgtcaacccggccacgagggcactcgtcctgcaagcaatcgaagaacaagcaagaacaagtaggacaagcactgaaattgctagataaagatgaaagtttcactatcaaacacaatatggtggggttccgattacaggcagacgggcggtttagccaacacgcgcgctgcgagccggtagcaagaagctaactctatcatcaaaacccgcctgttcttggcggcgactagaggtataaaaaagaggggaagaacgaccatagggtcgtgctccaaccctaagacgcgcccctaatgggcccaacatggatacacagcccattgggccaaagaggtg

SEQ ID NO: 50736 - DNA, 721 bp, Oryza sativa
tggaacccctctttttaattagtaccataccgtgaatttttattgtgttgaagccacataaaagagggcgtatctcaatcttagctgcctggtctggtagtgcggacttgtaaccccatgctttggggggcatggagttggcaattgtgctagtcgtttcctagtaacaaccaaatctaaaagtcccttaataagggagacaccctcattttaagggagcctgcaagggttcgaccccacacaaagtaaaaaatgtgctggcgtcgtaaatggtttggaattgtggcagcaagtcagcccgcccaaactggatttcggcctcctagctagagaaaacgtacccagcctcttgtcaactccacatttttttcttctctctgtcattcataaacttcttgggtttttttaatgtcttcaccagcaagctaacccgctcaatatgtcattcataaacttcttgggtttttttaatgccttcaccagctagctaacccgctcaagaaaatatcaactccacattttttccttctctctgtcatttataaacttcttgggtttttttaatgtcttcaccagcaagctaacccgctcaagaaaatgtcaactccacattttttccttctctctgtcatttataaatttcttgggtttttttaatgtcttcaccagcaagctaacccgctcaatatgtcattcataaactttgtgggtttttttaatg

SEQ ID NO: 50737 - DNA, 930 bp, Oryza sativa
tgatggagatgtggaggtggcgaaaccggagcctacccgcgttgtcggagttggcggcgcaaggattgtcgatgtagagccatttctgcatccaatgccaatcctacttcggtatggacgtagggaccggccatgagtccgaccgctctggtcggaggttgaagttcacactgccgaagacagacttcttcggcccagcgggtgtgtgcacatctttcgtcgatgcactggcggtgaagaggagggcgaagagctccactataggagcgaacccggtcgttcggcacatctaagcgaagacggagagctttgcgatggccaaagggctgagttgcggaagcctcgcctcatacatctccaggacggagggcaagaaattgtcgcacggcagccagaagtccacgtcgaagaaggaggcaaagaccacggttcgcccgtcgcctggcgctaggacgatgtcattgctaggttgagaggcatggccttcggcagttaccccaacaagaaccattgcggctacatcggagtcgttaacctttgacttgcccaggtagcaagtccagttgttgccaaggctcccggggccatcgtcaatcgcaccatcttgggtaggtttgcgtggggccattttcatccgtggtgaaggagaaagcaccaagcgagtacaaaggcgaaaggcttaatgggggagaaggacaaactcacgagagcgaaaagcacaagatgcatgagagtgagggtgactgaaagcaactgtggtaaaaaagtgagaggtgtaaaggtcaaagcgatccgtcgggggggggggaggggtggttgtagcccgatgaagcgacgcttcgccttccacccaatcctagcccgccacgtgtcacaaggggggtagatgaaacggtaaattcccattggatcaggccacacagtataagg

SEQ ID NO: 50738 - DNA, 3757 bp, Oryza sativa
aaaccgttgggcgaaccaaaatgacgaagaccaagggtgtttcgccatcaagaatgggcgaagccgtgaaatgaaagccgaagggtttgcctccaggctcatcgatcaaccggagatccaccacgggcgagggctgtagggtgaagcacaaggccatcgcccgaagtagcaaataccttcggctaaaggcttaggaggcctagcagcctatagaggcccttcgccagctattgggccggcccaagggggctgtctcaaggcctatgaatgtaaaagacactatatacccgttgtaatttgcctgttatgagggtaaccatgtaaatttccatgtattagccaaaccctagagggtatgagcctgtactaggattataattaaatagcctcctagggccatgtaatgggggatccaaaaattttaccaattaatatattgacttactattctaaccacacatcgagtttaccacgtccttcaacgtgaagcagttgtcattcgacaataattcccaacaagagacaccctcggagcgttcctctcatatgtaacggctactactcttgaaccgttacagatgagtcttcatctgtaatggcagactcatatgtaacgagcctccagctaattattagccacatcgctgtaatgaatgcttggtaacggttggctgagccattatactctctctttctaaatatttaacactgttaactctttagcacatgtttgaccgttcgttttattcaaaagcttatgtgaaatatgtaaaactatatgtatacatatataagtatatttaacaatgaatcaaataataggaaaagaattaataattatttaattttttttaataagacgaacggtcaaacatattataaaaagtaaacggtgttaaatagtatctatcttgagccgttacagatagctaggattatgctagtgacgcgaccccgagaagaataacgtaggtacgccactgtgcgtatgtactactactactaagctatagagcagtatatatattgctcactgtttgttttggaaaaatgaacagtttgcaatgcacttaaattaatttaattcaattgacaactagacagacaacttgaaacaactttcgtacagcccaatttcttggaatgaactatattgttcagagaaattatatatatatgtttggaaggtgagtagcatttgctcgttgaacacatgcactacaagtcttccacgcatgtttttgacctgaccatgcgatccgaacttcaactataggacttgtaattgcacccatttttgtgatcccttctaacaaactgcgatataaagatgatgtctaacctgccagttttccaggcatgttgtttgacatttggttttttcttgtcttgtagtaggctgtagctagctagctactccctctgtcctagaatgtagctatttttaggattcaaacttgtcccaaaaaatgctattccctctgtcccagaatgtagctatttttaggattcaaacttgtcccaaaaaatgctatttctaggtaggtgagaggctgttatacctgttttacctctgctgactaccccgtgccatgggacccacgggccaccatccagtgcactgcacccccacagcactgacacaccacagaccccaccccagtgcatggaggagacgaggagagaggcaccagacttctttggtttgaatttcaaaagttggttccatttttttattctggatatgcaggtgccaggggaatagcagctgtgggaggaatgctgcgtgtccttgtgccagcatattcatgattccataaaagaagggcactatggtcataacacccaaaaccttaatccatccaaacaacctagaaatagctacattctgggacggaggtggtagtcgcttgacatttggaattatgcttggctagcttctatctggtcaaagataatgtttcttaattacacaaccacctaaaatactcccaggcatacctgaaaaataattcaactatagcattttcaatatttgtttattgtttactcaaactaaaaaagaataagggaaactagctaggaggatatatagagtgttatttgaactgcagtatgaattttcttactacctctatccctgaattttcagggttagaatgagtattaaggaaatagctaggtagaattaaatgggtagatgttgtgattgaggaagaagagaaagtaggtggagaatttaattggtggaaggttataattaattgagaagagaatataggtgaacaagttgttatatttaaaaaaattttaaatgttaaaagttgttaaattttaagaccaaaaatgtattgtacactggcagtagttagtacacgtcacaacaatattttttaggaagatcatataaaaataacggggccaatgtaacaggctcactgatagcagcctcatgacgtcatattcaaaggcacgcttggacgttgtaggacggagggagtatgcttcttatcacccgaatgagagaaagaaaataacatgtgaaccgtagttcgaatgggagatcccaacaaggtctacatgttcgacttaaaaaaaaaaaagatttccggacaactaaaaaatactacctccatttattttattgtgacttgattcgtcatcaaatattctttaagtatgacataaatattttcatatttgcacaaaaattttaaataaaacgaatagccaaacgttggttgaaaagtcaacggtgtcatacattaaatacggagggagtagcatcgatcgtcgttttgttttcttcttccaatagcgcagtagaatactgcaaagggctgcaagagcatccactgaaccgaaggaaaaggcaggagcctattccatataaatttactttgaggtgtgagttgggatacaattaaattgttgactggaattacgtgaccattaataaaattagtgtacttcactaaattcgtttgtagaccatgtgatcgaatatgcgcgtgatgcagctgtctctttctttcgggtgtaacacgtcgaattgtaatatcagcaatccgcactcacatgtttactagggaaaatgttccaggtttaacagtcaactataaaattgttcagtaatttttttcccattttttagatatgtggccagtttgtttttccacacgatcatttgaccggttacactatcatgagaaattttgcttatttaatattagaaaacacgtatttgatcactgggggagaaagcgtttatactcccggttcataacccccctatactcccggttgtaaccgggagtatgaatccgggactaaagatacccatctttagtcccaggtgaaataacgggatagggctacgtcatcgattgttttttactttttattgttttttctgcttgtacctattccccacctagatccacccaaccattcacaaattatgcataataaaatcatccacaaatcatacacattcacaatccacaaatcatacacatccacaatccacaaatcaatcacaaaatcatccccaaatcaacaagaaaaatctccaacaaaatatacaaatcattcactacaaaatatataaagaaaatcacacgctgccacctggccaacgccacccgccatgcgcccaggcaccgacgcccggccgtgcgcaaccggccacgctagctgccacaaccgccccagctcggtcgcgccctccgcgccggacgccgttcgggcgtgccct

SEQ ID NO: 50739 - DNA, 1372 bp, Oryza sativa
atagccgcgccctcggttatgggcaagccgagcaatgtacccaagtcagtgttttaattcttaaaatttgcttaacaactaaaatgtggaatggttggcctcggttggcttgggacgagctgtgacccagggtcgggttgccagttcggtctgaatcatcgtaggccttgggttaaggcaggttcgtgagggttcacgaccttgattaataatactgtgtagctctaggatcgtctttataaaatggctttgggcaactaagtgacttttaaatgctgtttactgcaaaacttaacccctattttattatccccttgtactcccttgcattaattatgcatctccggtgtggcttgctgagtactgtggttgtactcattcttgctcaatcttttcccccttcagtaagagaagctttggagaagaagtcttaggtggagtcctggcttataccccagttgagcgcctgtgaagatggagccgtaggcccgctagtccgctgctgtttatttttgattgtcaggccttaagtgcctttgtaataatgtaaatattatcgatataataaagatgtgtcttttatatcatgtttgtatggtgtaccccggcttttcctgggacggggattaatacactagcgttcgggaaaatgaaattttcccggtcgcgacaagctggtatcagagccatctcgactgtaggttaagccaagtggataaaacctaaggacatattttataaataaaactatttgcgaaagttcctctttttctccttcccctaatgctatttgcaaaaggtttactcttttcttccttcttcaaatttcaactagtactagatggccagctttgcgaagaagaagatgtcgccaattgtttgccgaagctccggaagactggaggatccgcttcagaagtgcaggaagcagtgaagccagctgtgaaggagtgaagatcttggagaacccgtcgcagaacctaagccaccctctagtgtttcgtctgtcgtgtgttcctttgcttgtgtgtgtagcgcgtggattgcatcggtgggtggtgatgtaaccatgctaggttgtttgcttaatcaacctgcagaataagcaaaacaaacaacacatcaacaaaaagagttagttcctttaaggtcttatccctagttctggtctattctttccttgtatgcttcccctctcaatctctaccttgtgacagatggataacactggtaacaaaggctatgggaatgatggatccgatgactcaagaacccaagccaatgggaatgagaaaagcatcaacgaaacctcaccagagctaatccaaattgtggttaaccaaaccaacatgttggcaacagcctttcaact

SEQ ID NO: 50740 - DNA, 643 bp, Oryza sativa
actttctgcaatatcaccgcactcaggacagtcttcaatagatggcagcctcataccctcattccaacaaaatctaaagaactcacaaccccaatgaggatcaaagccgttatcatcttcttcataatgcttctcatactgcctgttatatttcttttgatacttgttataattttagccgaattcacctgaaaaccccttgcacgtcctccatcggctgttcggccagctgtatgcaccatattgacaggaaaaggattgccatcaaccttcatcggcctcttagaatcatcaaacttgattttgcctccctcaatagctgcctggatctgctacctaaagactttgcaatcattggtagaatgagacccagaattatgccacttgcaatacctcttcttgcccaattctttagccgatgggattgtatgactagcaggaagttgaatctgtttctcccgaagtggcacatcaaaaatcttatcagccttagtaacatcaaagtcatacctttcctcctttccagaattctttacccattggcatggtataactttcttgcttctaacccattcggctgctgctatttcggagtcatcctcatcctcatcatccgatccatatatgtaaggagaaacatgat

SEQ ID NO: 50741 - DNA, 3655 bp, Oryza sativa
gattggaggttagatagcaagatgatcagagattatataagagatatgatagctgggcgacttaggtaggcaagattagagtatcataatgatggaagcactaatcccgagaacgcaagccgccataacaagtcatacctctagttgaagatcgagaccgatgcaactcaacccgaaagcaagaattcgtcgaaacaaaacgaaagtaaaagggtggcgatgcgccgagattgtatttgaacacgtgttatctaattacatggggttcggggtctatttatacccgagattacaaaatatgtccttgtcggacacgactcttatctctaacaaactctaagatccaagctttaataacatattttaacttactactacagatccaggcttcagtgacgggtcatctgtgacgggccaacgcaactcgtcaaagatgagtcatctctgacgggccgaaaaaatatcctcttcaatatatggctactagggaggacccgtcacagatgtgaggtcatctgtgacgacttgcacttgtaacccgtcacagatggctctttaactaaaaagagaccactcatctctgatgggtcattaactaacacacgtcacaggtaacgttatgtctgacgggtggtagttatgacccgtcagtgatgagtgaaaattcaaatttttaaattttgcaaaaaacctcggattgagacatgtcctatataaaagtaaagttgtagctctcgatgatatccacaactttataactaataacatttctattagagatcgtttacatccccgaagatgcattacaagtgatgagatctacttttaaaaacaaaattttgagttttttttcaaatgacatggatggatacatgccccatatcaaagtcatagaactcaaccagatctacaacattaataattgaaaatattttcatttgacaaagtttacatgttcaaaatacatgttataaagtgagatctattttgaaaaatgaaattttgaattcttcaaacaacatcggatgaagatattttctatgtaaaagttataaaacacgatgagatctataactatttagttgataatattttcatttgaagtcatttagggtgttaaatatatgttaaatgattcagacaaacatagacaaaataataacattgggtgagtaatcaatatgtgctgagtaggtgagttggtaaggaagctctctatggtggttgaggtcttaagtttgaatctcacgtttagcatgcaagttatattgcgtgaaaaattgtgaatttgtaggtagtgatgtgtaactatgtataggatggctagtaaaattcaaaatatttttttgaggttttttttgttgcgtttaaaatttaaaaattgtatttcttgctttgtcatcagtgacgggtcgtaagtttcaacccgtcagagattagtcgtcagtgatggtcaggtagttatgacacgtcactgatgacttatctgtgacgggtgacaagttgttagacccgtcagagatgacttatataccggtcagagatgagttatctgtgacgggtgtttcacccgtcacaggtgattttgtcatcagtgaccactaatcactgaccaaggccaaacccatcaaaggtgagggtttgggcccgtcagagatgacctggtccggcgtagtatcaaactatttcatgtatattatatcatcaacaactacaaaatcagtatcacatgaaagtattttaaaacacaaatctaatgatataacctatataatacttggcgtagatattattagtgtacttattagtcaatagatacattttcaaaaaataagagcggagagagtatataagtaacttataagtgtactggagatacaacgaagaagcatctgtaaagttgtataccatttacaacgttttgcaaatgacactggtacaaaaatgtttcttgcggactgtccaaaaggggtttttgcgtgcggtatggctagctgcatgcacaaaacactaccacagaaagggctttcggtgccggttggcaaaccccgttaggaaccggcacctttgaggtatacgatttacaaaaaaaaaatccggctcgccgagccgatgcttcaaagcaccaaaaataaatccaaaaaaaagagaaaataatccacaatcagacaatcaacaattaagttcatgggtcaaatgttcatgtaattttcacatcagacactcaacaacaagttcatgcatcaaatgttcatcaaattttcacatcattgaatcaaacatcataaatgttcagacaatcaacagcaagtcagcacaggttctcaccggaggtggaagcaacaggacaccatcgggcaccgtaggcgaggggaggcggacagagatgccgccggatccgaagccccccaacatcgccgccaccgccgccaccgctgctgcctcccctcccgccggatctggcggaggggagggcgccaccgctgccaccgtcgccccaaggatccgccgccaccgggccaccaccaggccaccaccgcctctcctcccaccgtcaggcctccagagttggcagagggagggcgctcccaccgtctgccaccgcctcctaccctcccgccatctgccgctgttgcacctccatgccatccgccgccaccacgcctcccctcccgcccctgccggatttggcggaggggagggcgccgccatacctcccgcctctgccgggccggtaccgccgtcgtcgccgggctgcggctccacatagagagggagggaaagcgagagaggagcagtggagaaaagatcgagagaaatggagaaagctggccttatctcctctgagtgtgggccccgccgggagaagaaatatctcctccggctcggctcggctcgataataaatgtgtcggttttttaaaaaaccggcacctataaagttgtcagtttttactgaaaaactaacatggtgttgttttcttttacagaaccgacacctattatcacttaaatgtgccggtttttattattttcggaccatggaggtagcaaaggcctataggtgccggttttagcacttccggcacctataatgcagacacctatttgatgagtagtagtgaaatggtctgtgaaaattgctatttttgcatacgggtggcacacccgtatacgaaaatcggattttcgcgcacgtgaaaatggaaaatcgcaaaaaaaaattccaaaacacaaagacctaaccctagccggttgccgccaccatcgtcgctggcggatctgcctctcccgtctccactgtcggcggttccgtaccaaccatcatcgccagccgcgaatccgcgcgcgtggaggccgaatccacactgtcgctgacgtccgcgcatgttgcggagcccgtgcctaccgccatcatgctgcctgctgccggatccgcgttggaatgggaggctagggagagccgccgttggcctcccactcgagcctattgccggatccacgtgggggaggcccaaggggctaccattgtagctgtcgctcacgcccttcatcgccgcaatcgccggatctgccgccctcacggtcaccgcagtcgccgccctccttcgcagcaggcactcctgaaggtgccgccactgaatctgtgcgggggt

SEQ ID NO: 50742 - DNA, 675 bp, Oryza sativa
aggcccgggagaggagggaaagagagggaggagagggagacttcggccgcgggccgaaagagagagaggggagactttgggccaaacttggcccaaaggaaaaggaggattatttttagattttctttttattaaactttgataattgtttttgttgcttaataattatttccggtgctctgaaaattcaagtaaaatttgagggctccttttagaccaaggagaatttaacaaaaattctccgggccacatttgaatatttcttgtacgtatttttagtgtttgccaatttcttttcgaattttaattaattctattattccttttagcgaatgatttttaattcgggatgaatttatcaggacgtgacagccgagccgccgccgctgtcggtgacgtcaccgctgacgtcatcggggtcgtccgccgtgagccggtcgtggaccgatcgatctcggccgtccatcttggatcggttagatctcggccgtccgttcgcgtgaaccgccgcccgtgcgcccggtccaccaaaaccctagccgctgacgcaataaaccttctcttccttttcaaaattaattcattattgcgtcataattcaattttaaccaatttaagtgttttaatccggtttaatctttaaaaattcataactaattcatcttagctccgatt

SEQ ID NO: 50743 - DNA, 1637 bp, Oryza sativa
cctgtattgcaaaaaaatattatgtttttgattattcttaaggggattttcatttgtggtatttaggttcctgaagggcttgcacagcatgttacatcacctatgcaggcacaggttacatggttaggagaagatccagatttaacagcttctgaacttaattttccattaaccattacattttgtatacataagtcaataattctaaagctgcattgagtcctatagttcaatatagaaatccagttagccacccaaagctgatactctcttcgattgctatcaggtataataccctctttataatatccaatgatttttagcaatggaactatcacaattaacactgctgtatacatgtattttaatgagcacatacacagttttttgaaacaaatttgtactttatttttttggtataaatctatatagcttataaataatgaatttatatcctgtaggcctcgtgatcatctgtaagacatattacccaagccactgtatcctaaacgtagaggtttaaaaattaataattttcattgttttttttaactcggaacaatatgctttagttctattctttgcgaagaacaatattcttagtcaagggccattcagctaaaatttttgtttctctaactaaattaagataatagttttgcacttttacttttgataggtataggaaattgttggccgcatacaaggatattaaatatccacccaaagaatcaccagatgctgctgtgcttgttgctgcccccttgagagggatcgaacgaactaatttggaggtaattatttgaaggtattaggatagtcacaaaatttatctacatatatatgaagcaagtaaagaaatattattcaaatgctagtttctctatttcttagcaactgaagtactcaatctatcccagaatagttttttacatggtctctaacatagaactttttccttttaatttattttccataagatattatgaatgctcttttaaatacgaatctaataatatcacatgcatggcacaaaacattgttagttattttacttattagtcaagggaaaatgttgattttcctaaattatattctgaaaaaatgtctcaattgttggtgatatagtacatgcagatacaacaaaatttcataaggacgttagattgttcgcatttcctgggacatgaaaaaatcgtatggatcttatttcaaaaaaaattgtatggagaggctatacgctataatattgtgcacatttaacaaaaagattgttggtagataaaaaatctattttccctagaagtgtaagagaatgtctaggtttaccattagggcagtattgttagttaaattaaaatcattctttttgtatcaactcaaaattataacattggataatactatcaactcagagaataatctgttaattgttgatgattttctccaaatctggactgctaaagaaattataaaaccagttaccattgttttatttttgtctggtaactgttttactttcagattaacaccacaacaaggcaatgtggacatatgtttaatatattcagtctcctaaactcaggaagaaattaatatttttttatattgtctgttattagaaatgagcatcattt

SEQ ID NO: 50744 - DNA, 616 bp, Oryza sativa
tatccaatgagtgggaaaaccaaggaaaggattccatataaaacatcgttaagtcgttataattgttaccattaacatacctaaaagtagagagggtatgtaacatatgtttaaataatgtttttagttgtgattttgatttcaagtatctccctagtagcttagaaactagggcccattgatatggatgaaatgcggatgaaagctaatgaatgatatgtttataataaattaaatatgatttattgtaaacctaaccaatagattaggtggtacgttctcagtagtttacagattatagatgatctccgccacacttttcaaactcataaacgttatgttttgccaaaaaaattcctccaataatttttttaaaattttttaaatcacctaatcaacttctaaaattaaattaattcattggggccatcgactaattgttaaactcggtttccatctatcataatcctattttgagagggcacattgaacaagtggtctgagcaatattgatttagaaagttaatggacaaatcgtatttttagaaacatgacgtgaataatctgcaaataattcgtagcaattaatctacaaagaacagggctgcactcatag

SEQ ID NO: 50745 - DNA, 692 bp, Oryza sativa
caagagaaggagactcccgtcaacaccaacggaggcaatactgtctcaaactccagcggaggaccattcttggggtatatccttattacattatttcaattagaagttttcactgtgtaatggtcatcgcaatgtcaacattggtcattatgtgattgttgatgcttattcaacgttaagcatcctcatgttgattacattcaccactatcactggatcaaatcctattgtaaatatcatgattattatcttgttattttggattaaaatatgccgaattatgaccaaatttccaacaaatgctaggcatgagaagtataggattttaggagtaatgatacaacatggatgccctgtaagtgtgaggaagcgggatacatggaccaattattgctagattcaggtggtagggataaagagatataaggtagcgatggaaactttctcgcatgccaagggtcatggggaggttgaagaggaacggctttttccccgtggaacccaccttattttctacaccacccataaatgtggtgtttgcaccactaataccacatgctaaggtcctctttccggttaactttcattgaaaagaagtaaatattctctatggtaaattggtaataaggtgtaatatcttaaaccacatttatcaacccgttattggtgcttctacgacgaaagtttaatct

SEQ ID NO: 50746 - DNA, 675 bp, Oryza sativa
aaagccatttgcatgcatggcctctcaaagctcaaagcctcaaagccatttgcatgcagccatgtacagtgccatgcaagcaaaccataataggcatcaacatgctaattaaaaccgcatgtatgcataacctatgttttttaatttgttaactgtgcctccctgtagtaagcacgtactaaggcgtcatgaactatatgggcaggtataaatatcaggaagagaaggcgctaccctcctgatatgaaacgaagcatatatgctttgtgtttagagagatcaactaatggcatcataaaggagggagtgaccaaatctgttgctaacgacatgcgggtggggaaactgtggagagttgtccaacgtgtatggcggccgcaaaaaaacttccctttaacgctaatgcactggtggagaaaccctttgtagtcccggttcgtaacccccctttagtcccggtttccagaccgggagtaccaatccgggactaaagatcgagctgacctttttttttttgaatggccctgttgctgcatggtttatatatatatatatatatatatatatatatatatatatatatatatatatatatatatatataaaaacccggcatatatatctttcaatacatatataggcatacatatatataggtatatatatatattatat

SEQ ID NO: 50747 - DNA, 1121 bp, Oryza sativa
tgggtcccacaccattttgtcacctgggttgccacgttggtatgccacgtgggcaaaagtggtaaatagttaagatgccacatctaagaggggcaaaaaaaaaagagcaaacgtaataagggtatttggataattgccaaacctaaaagtggtaaatagttaaattccccttaattgcaaggcatataactatgtgccgggaatgctcgtgtttatagggtagttaattgctagggaaaaaaaatctgctaggaattctctttcgctacaggactttatagggcagtttttaagtgccgagaatacattattgcccatctagggcagttgcattgaggggaatactaggtcatggagtagtgtatgcctgtatggacacagatcgatcgacgtcgtaactggtcagaggttctgacatgcatgggttgttcaaggaaatcaatgccatgttgcatgactgaccactatactgcaatacttctatgctgtatatatgctccctgtaattgtgtcgattttgtacattctagttccatgaaaacatttctgccttttgaataaaaaatatagggctagctctagtgctctacacactgttactgaaactaaaactttggctaggtagttaactagtactgatatcgacatacattgactgaaattataagttttcaatcgtttgttagcaaataattcttgtgcatgcagttcatttctttcttgtgttctgtttagttagggcatggcgcagcacgccctgatgtgtgggatggcacaagaagtggacgggcgtggcatgtgcagtgccatcaaggccacgatctagtttctgttttgtctatttaagttgcaatatcagataaagaaaagctgctgcttcgcagcaccaaaaactctccttgtgttccaagttttttcatcaggtgttccactgatcaccgtgtgtagcttttctctgacatcattgtgaatcttcagtttatctatgttgaataattatgaggtgttttacaaggtgataagcacctgaggagaaataaaatgtgaatgtagaacatgttgacatggcgacatttatcccttctagctagttgtagacatggatactagatagttctaga

SEQ ID NO: 50748 - DNA, 718 bp, Oryza sativa
atatagagtcgggtgggtcggaaacaaaatgacatatcctcaaactcaacatgtgcgccaacgtaagattccaccactctaccatcgtagtaaacactaacaagtttatccatctacaccaaaaaaaataaaatctgactttaccaaaaattacatcatccttcctaaacatagtccaaactgacaaattataaccaatgcataacttaaattgtcccaaagctactacttcacgaaaaatatttaatccacatccaacagtaccaacaagttttttagtgcattaaacatcaaaatattacaaatactccgtcatacaacccaacctagttctaattaactttaataaatttctataatgctaccaaattcgtccctccttcgtataattcatacctaaaatatttctttcatgtctcaagtcaatttttccatccatccaaccaaaccacctaaaagtccaaattaccattaccacatatatagttcaaaaaagagtggcactaacgagtacattgcatacatgtagcactataatcagcaaatccccaaattggatgttgaaaatcacaaatttgggcaaaaatggggttctagggttaccctccaatctacaaatttcaccatttaaaacgaaaaaaaagaggggggaatggaggtgtataccttgctcttcggtttccacaaaaaatcccgcgaaaataggcctccaaattga

SEQ ID NO: 50749 - DNA, 1537 bp, Oryza sativa
tattattgcatgattaattaagtattaactatttttttaaaaaaggattaatatgattttttaaaacaactttcatatagaaagtttttgcataaatcacaccgtttagcagtttgtaaaacgtgtgcgcggaaaacgagagagatgggttgggaaaacgggggaagaacaaagccttaagattggtttattagggaaatcatactaaacttatttatgagagtgcatgcagtaaaacatacttgaaaaaaagaattgattgaacaaaagtgcaatttagcccatggcacttaaacctttataaacgcttcacacatactaattaaatttatatgattgtgctattctttcaaatcaattttatttttcaaagaaaataagaaaacatatgaaaaaaaagagaagagagtagaagtaaattaatagaagttttttttaattagatgaaacattcctattagccatattttttaatagaaaatatattcacttaatatattctaacattcataaatatatatatggtataaaagcaattttgttacttaaagcatagaaacataaaaaaaactctaaaaaaagataagatatgctaaatattaaaaagtaaatacacatagtacaaatgatagttttataagaaccaactccattattatgacaacatattttctcatagtttcaaaacggcgtagttccaattaattttaatttagaatttaaacttccaagggtaaatataagaaaatcataaccaaaattcaaagcaatccaaaacaaattagtgaaaaaacacgtttacaatagtgtcaaagaataattttaagaaaagtcacccacacataaaacattcttaacacaatttaaaacaacatcagataagatgcctgcgcatgtgcgcgggctatcttcctagtttagtttaattatcaaataaataaggtaaataaacaataaaagtcatacaaagtctaactcattagaagcttgagctcggcttggcaaagcctatgaggtctagggttaggcttggccgggctcggctcatctaaagctcgagccgagctcgagtggttccggacctgagcctgcagactaatgctgttagatttaattgggtaattaatccatttaaatcaattaaatcaaataaattccaaggctcattatgctaggaattcatgtgaattcattcttctatgggatatcaatgggatgaagagttttgagaattaatccatttgattaaggaattggtaacttatatcaattagtcctaattgatggatggttgatggttgtgtaatggaggatggttcatggctagttgatgacaattagttgctctattcttcttcctattccattgggaacttacattaattactctttaattgattgttggttgatggttgtgtaatggaggatgggtcatgactagttgatgacaatagttgctccattcctcttcctattccatgactctaactcttaatctttcatccctcttataaaaggggaatggaattgatctccc

SEQ ID NO: 50750 - DNA, 3235 bp, Oryza sativa
tcacgggtgtgaaaaaaattaccccaaccccaaagtgaacccctgaccccccaagcggtggagaaggagagcgcctcctcctccatcatgggcgcgtatacctctggctcgtacgcgagccctccggccaccacctcccatcgcccccggctgccgccgtgatccggccgacgaggttcgcgaccccgtggggctgccgcatggggggaacccagaacgaccccccggcgacgaaggggagctagtcgggcgccacacggcgcaccatgacgccatgaatcgcctcctccaggcgcctgaccccgaccatctccaccgacgcaggggaggaggcggggcccaaggtggaggcgtccgcggcggcatcgtcctcggcgaggttgtggacccccgtttttataacaggaatcaatcgtgtaaacagtaccattttcctggatcaagtagtctggtacacacgaattcttagctgaaataccatgtgcacatacacgagtgtctagtacgaatcattacatcataagcccgcagacatagtcttaaatcatcggaccgaacggtccggaatacatcccaaaaaaagaagtaggtaaggcagcggagttaaggcagcggcacgccattgccacaggcaacgaccgtaactaagacctactgggcgccatcgtcttcatcaccctcctggtagtaagcgtagggatcctccgaagcttcatctccgacctctgattaagtttgtatattgcaagggtgagtaccaaccgtactcagcaagccaccacagcaataatacacatgacaggggtattcaaaggatggctatggttcttttgcgcaaagcaagttttgtaattcttttcacaagcctaagacctagcacagattgatcaaattttagtaccagtgttcatattaaacaatgacggttctgtccaccatccattgtgatcctaaggatagcttcccgccattgagtcgtcatggttttctgaggacgtccacattcccgcctctcaggaagtggctccatcagcatagaaatcatcatgcaatatcccatcccacacaaattaagaatttagagtctagccaagtgtaatacatgtcccggtgctcaataaccgcgagcacggctattcgaatagatttggtttactcacactgcagtggatgtacactttacccgcactccgcgactgtccaacacatgagcctcgtcccaacacatgagacgcgtcacggcaaagccttttgataacctcgcattggcagtacccactccatgaactttagtcctcatgcactctaggcgtcatacgtttctagcagtgagaggagttctggcgctcccgggaagggaaaaacacacactgctacgttgcttcttgtcgttgaacccagtccatcatgattgttctcttatgggtatcctcatgtagtattgccaagccagcctctgaccatctggaacgggcatccaccatccacctggccatccgaatcgggcatccgccagcagactgcttgccgcatcacacacctaaaagaagaccactacgcatggatattgcctccgctcagctatctactccgctaggtctatacccatacgagaagtgcggttgtacgggggtcgtttcatgcttaacttcatggctcggtccttaactgaccagggacggcactagcctttttcggacaccacccaaaacctccagccgccccagtcgaaaacagttgtttagtttttatttctcctttcacaaatcatgtcatcaacatcatggaaatgtggcgctcatgtctccacatgccacatctcaattaccttcccaaaggtaattgcccaagcatataacatttgataaatatgagtatgcatgattctaaaatagcatttctaagcaattgtcataattgactagggactcatacgtaaacatggttacaaggattttaagggtaaacaataatcaaggcatggcataatcacaagtaggatgtttatcattgcatgcaattttatttgtaaacaaaataatttcgcaattgggatcaacatgttcaaagaatagtgatgacttgccttgctcaaagtctttcgggtcttgaccttcgcttggatccgcaactctctcggactctatagttacgtgcgaaaattgatttgaattcggttagaattcaaataaaaatccaaatcaatccaaatgaaagtcgaatgcgaaagtcgattcctttatattaactttactattcgcgaactaaggcaaacccaattttgattcaaactattttgcgggtataaatattttgttgtcataagtttttaatttaatctacccgagcattatatccatataataggttagaaatttctatcgcgagctaaatatcggacgaaatcctagaaatattatacaatttaatttagtctatgactaaatgattaaatataatacacggctaaaatccctagtaattaaatccgaatttctaccgtgaatcgattacttatagggattacccaaaaataatctataataatatataagaattcatctatttgtttagttatgaattacatctaaattactaccgcgaattgatttcttatagaaattaccaagaataatccataatttatattaaattttgcaattctacgactataattaatctataattaaattctaattattttaaattttctaaacttccctaatctccccctaatttcttttttttttcttttctttttctctcctttcttttctttttccttttctttctctcttccctcttttctctctcccggctcctttctcccttcctctcttttctttttctctcctccctcccggcttctttctatctctctctctcggctctttgctcccccgggcggcgacggcggtgggcgcgaggtggagggggggaaagacggctcaccggcggcggcggtggcggcgacaacagcgacggcggcgcaggacacggcgcggcacccggtgcggtgcggcgtcaccgaggtcggcggcgcggcgtcaccgaggtcggcggcgcggcggcaacgatggtgacggcggcgcaagtcgcggcgtggcgcggcgactttgtggcgcggcgcggcggctcggaaacggccgcgcggcggcactacgacggcggcctgtggagaatgggggagagggagaggagaagggaatggagtggggaataatggagaggggtg

SEQ ID NO: 50751 - DNA, 785 bp, Oryza sativa
aagccacatcttagaggggcaaaacaatatgagcaaacgtaagaaggatatttggataattgccaagcctaggagtggcaaatagttaaattcccctgcaattaactggccttgatgcttagagcatccctggcattactctgaattagatgcaaccattacgcccttgtttatcagttatttccctggtagatagtagttttactggcacttgtttgtttcaataatgcaccaaagcagtacacatgggtccaatgtacaccaatccaaattagtaccaaatcagcccacaaaatcagtactgtgttcattagctttcttccaacaactttttatacacttcttgcaagggcatagtactatgttctctttggctaaatgggtaaaagcaaattgtataaattctttgaccccctgtatctatttagatgtgtgccctacagttcttttatggaagtttagagaagatcaatgaatggaaaaaacacatgtacgctacattaattgtcaggttactatgtacctaggaaggtccatccatctcttctgaattttttacattttggtccttttagaaaacttattttacaaatagacccctagaaaaacttattctaaaaatggtcctttttggtgcgccggaaaggctggcgccatcctccaacatggtggcgccaagttgacgtcatgcccgtgccaccccgtagatgagccggctgacgtggcaagagggggggggggcgttagccggtcctagggcgctcccattgggtgagacacgcggg

SEQ ID NO: 50752 - DNA, 684 bp, Oryza sativa
agggtacatgagcactgtgcaatgcacctggaccggaaagttaatgatgaaattgtcaccattggccacatttccttatcaatttccatgggagatttcatacatgatcgtatgggatggctacttgtgtttgaaaacaatgtgaagtgggtaaagatagtaactttgaaatcttttaagcataacatcaacttttcaacatacatgtctatatatatcagtaccagtatgagaacagttacttttactgtggaagttcataattggaacttggaagtaataataatttgcagtcattaaagaaccaactttcgccaggcatatatagtgtaggtttctactaggagtgaaggaaaacttcaaagccatactttgatgtttgctactagggctcttggaataaataacatgcagcatatggaaaggttcctgagaacctttgtccttcaatgcacctcttactacgttatgccgatgtacgtagtggctagtgttatcctgttaggttattgtaatataccataatgcagggtaatacagatggatattgcagtgcaccagtctggtggtgttcacatttagctgacaaaataaaacactgcttggatcaaacatttgttccttttatcaaaccagacgtagatacagagaacatgatgctgctcttttaaagggcaaatgcaa

SEQ ID NO: 50753 - DNA, 1085 bp, Oryza sativa
ttttttttttttgagagctcatattttgccaacagtttcattcagtcaattattgtgatacatgcgtaagatggtcagttatacaggttcaagatccctttgaggcagagaatgtatttcatcaattactttcttgactctttggagtacagtaaaccattatagggatgcttgtctgtcattgaatttataaaaaaaaagatcctttgatgcactcagtgggtgagagatactcatcggctgtagatggtggtgttttggtgtctgtttgatactgttggtacccctttactctttcttgttttgtttggatgttgaatgacataatgtgattgcttcactacggttagttaggtgacaccaatgtatcaaactatttgggtgtcatccttcaaacatttaatttttctctgataggcaatccaaaactgttcaagaaagaaagtatcaatcagagaatatttgcctcaataacttggcccattaaatgaaaatgcattaggcttgaaagacaatttattatatgaaaggaagtacatagatactttttatgaggcggtaggatggtcagggtaaatgtttatgtatttttcccatgaacagaatagattgtttcgtatgttctgttgccagctttgtttccaacttatatatctctgtacatgaatatgtctcttgatttgtttctttagataatggacatttcattaagtaactacatgtctctcgatgcctatacctactgagtgccatttgattcagtgggaagatatttttgcagctgcaattgtcagttgtttcagaaaccagaactagattatccattgaaaacttcagagtaacctcatgatccttcaataatttaatagtggcatctgaaatctatgacttgtttacaggaaataatctgttacccacttgcaatgcttcaagtaaacgtgaacaactggttcttgagcatttacctaactaactgtgttgaggtaaccatgcagaagtgcagaaactgttcataatctagtttttcagaccctgcatgaaagtgactcggtgatattaatgccgtatagttttggaaaacctgt

SEQ ID NO: 50754 - DNA, 4734 bp, Oryza sativa
ggggaatctgagaatgtcttgtgctttaaattaacaccatatcatccatcggtgcgaagtcgatcgtcacgaaggcgtgatcagcgatcgtacctttgatgatgggtgcccaagtactgggtttctgtacatgttcttggaggtggagatggtggttgaaatctctcagagagaggcacactcccacacacctcatggcagcatgtcacctgttcatctctctttcaggaacatcttgttctacatacttacattgctcaattttgagcgattcgatctaatatgcggttttcgctttcggagaaggcgtccattttcgatgatcataccttcttctcctcttgcagctgctgggtgccttgacttgctaggaaatagtttgcagctccttttccatggatgctgacctcctactgtcccttagctgcattccctttccatgatgatgacatgctacttgaacacttttcatcagagtatcagattctgctgcaaggtgcttccctctctgtgtgccaccttgcagcaacattaggtcactcacccccagtgcataaaatctatatgatcttgcaaattgtgttttcctttttgagttcaatgtctctcagacaagttaggctggatcggtgttatttaccttatctttctttgggtaaggaaaggaagaactttgaagccaagacagggtaatatagagtagtaggaaagtggagctgttgcatctccaaacaattggaacttgtgtttctactttgccggcatgaaagcaatttttaagcaagtttatcatgaatgccccggcattgcaaacatggaccttttttttatctaacaaactcggtgaactttttttttcggagcttcgaaaatggttgagtggtatggttcaaataagagtaaaaaacaatcaaatcttgggatttcattttttttccaataaaacccagtaaaagaaggtgcaatggaatttcagtagaaggatgcaagaaagagaaagttctacagggtgcagaatataggcttcctgctagtagctgctgcacacaatgtcatgggactgttcatgtgcttggttcatcagggaaaatgataagacatctgcaccaattattgtgagtgcctatctaactttgcatgttcctgtttacattttaaaatttctttcttcatttttcatggaaaaaacaacagcctaatcaatgcctgaagtctgaactctgttcttctctacgttattactgtttcaacaggatggcacagtgttattgatggtaacggttttctctatctgttaatctgacctgctacataattgtcatcatttttcttaaatctcctccattctggcaccatcaaaccaaaatctctttaggagaaaaaaaccaatccaaaagcaaaagttaatttgaaaagaaacaaatatgaaaaacaatatgttactacacatcaaaggacaactaaaattgtgtgcatgaagacgtaggtagatattgtgtcatactgtcataagcaaaggctcaaccaaacgccactagatagataggagcatcatcaacttcacctaacaaagaggcaacagtatcaccggtggagatgatggatgatgagtagtagtagacaggcagccttccaatggctaatgcacacaattatagcataattaacacaccaaaagagccatgattaacctagagaggaatcatttggtaattggaggagagggctcatgaggaaatatgcccaagttttcctttacttcctctcttttctccagaaaaatatatggtgtgatttctccttttttgttatttatatgtgatgcatagaccaagaacaaaaataaagggtaatgttatacagatttttctttgcaaaatatttttcaaatataaatgttaagtaccattgtatttctattacattgaagacacattgcatatggtgcccaattttatgcatttgagtacctgatggagactacaaatacaaaacatacacccacgatgttctagtaattttgccagatctttctaaatattttttttgaaaagtatactatctcagtatttcttttcgacaaaaacattttttccataccatcacaaaatgcagtttgggtaggcctagatgaagaaggtttcttattcaacagtatcggattataggatataaggggtttaatttcattttttttataaaagatttatataaaaaagtggtgttttagatggtacctaattctgaggcattgagtacttgggatgcaagggtacaagtacaaaatgtgtaagacacatgaggccggagaaagtggttgtgaacttgtgatgggatgttcgttaaaacttaaaagttgtgtcgccttaatatttatttatttagcacttcattgagggcatttcttaatgttaattattcgcatagtctcacgtgctgcttacataaataatatagtccttattaagggaatggggaatgatattgatatatgtgagatgtcattagctaagctattaaatacagggacttggttcctctccaaaaatatatatatacagcgacattgctgccgaaatactaatcatgaaattatatttcattgctttaatcacgtgttttcagcttataaacaacagcaaaggaactcaaccatattataagagagttactccctctatctcaaaataaattgagttcgaaatttgtttcaaaagcttaagtccgtaaattaagaaattttatccattcagtatcctttactcatacatcgatactacttttactttgccttttttacaccactcattttttcttgggatgtaatggttcgatttattttgggactgagcgagtatctctgaatcaaaatgttcatcttagtgtaaattggattgcccaacttctttatgtatattaaggggacatggtttctctagtatatatactccgatagttctattttacttattgtttagatattaacaaagtcttcattagacattgttcactactacatttacaatattattaaaatgctatacaaaagtacttttatcatgaactactaattactctgtgccgctgcacttaatttaactgttgtgcagccaatacaaacagtgtgttgtgtctgcagctacagcggctacggctgcgtgcagcggctgccctgaccagccgaaaatgcccaatatatgtttatagattaactgtgatatttgtttgtatgcatgcattctaaatctcaattagtttttttttttgctaaaacgaattgcacataatgtacaaacctcatgttgttgcactctaagcatgtattagtcttcaattggccgccgacaggcaggcatcaaatcgtgaaccggaggatgtttggtgaagcgtacggcatcaggaccatgaacactttggaacggagctgcctagtaaatactaaacaaaacaaaataagtttagggagtattagcatgtagacgtctattaaaaaggacttttaaatttggtttctaaagagaagaaacaaacaaagggtcgacgcagaaaaggacattaccgtgacggctattgttgtattttaaatttgattgaattcagtggttttactttctttgcagaaaggatgttgctcattagctccttgattaatggacatctaaggcctcttatatggttaacaaatcacatcagcccaaaagtagtgtagaaccatcgatcgtatatagcaggccaaatggccaatatatatatggaaaagtagaccattttacaccctaactaactaactataactatatatatatatatatatatatatatatatatatatatatatatatatatatatatatatatatatatatatgtgtgtgtgtgtgtatatagttattcagcacataaaaaaatatcgaaaaacgtaggcattagggaggcttttttctttttgcgagtgcagcttataagccaagaacacttgatcaaagcaaacggaaaaccagttttagactaagattttcatactttttctcttggaagtctagcatgagctgagcgacagaaaaaaaactaaattaattctaaaattaagttttagaattgaaatttcaaattgtttgatgtcatttcctttcaactccttggtgtagaatcattaggtttattgtgtattccatatagtagaaaaatttattctaaatcccccaaaaaatgcacatgataattttatacatgactgtattttgcttaggcctcttctaggttgtagcactggcctgttgattaattctggcgagccaggcccaacgttttagaaagccggtattgcagagatactggccttggcctgaatttatcaaacataagttcatatatcaaatatctaggcctaacaaaatgtagctaattttaaattgaaatttaatatatttctacctatttattttgggttcaaacgacaccagccaaattaccagttcaccaccgttttttttttaacctaggctaggacttgcaagcatcagtcaggaaggtctgggatcaagaggtaaacagagcagactatgatttgtacaaataaataaataaaaaaagacctccctaggacaaagaaacagatcagactgtgtgttcgcacctcctggttgggaacacttccctccattaggaaaaacggagcatgccattagcacgtcattaattaagtattagtttttttaaaaaaagggctgcagg

SEQ ID NO: 50755 - DNA, 575 bp, Oryza sativa
ctgctctgtagtctgtatactccgctagattgaagttgaacactatctctagccctgtacattacgatgctttcctgaataaactgcagcttatacaaagactgggaaggtacatttcattggcttggctccctgacatctgtctggcaacataaaaacaattagtccgtgataatcaaaataagaggggtcagaaaaacttggtaattaacatagatggaagagagccaatcttgacgtcaaagtatgtagtaaaaacttccattttcctattggctgcgaattcaagttcctagtagaagattaacagcagtaactgatttagaacttcttgatctcatacctgatgttatgctagaaggcacaacatgctaggaacaaaatgaaagactagtaaagaaacactgattttagttctttcatttgacatcaggatattttgttgtaaatttaacatgaatagaactagttgtcactatgaaacacattgaagaactagaaatactccctctgggttgataatacttgttgttttggataaggacatggttacaatggggttaataatccattga

SEQ ID NO: 50756 - DNA, 512 bp, Oryza sativa
agaatcacttgagattcatcataaaatcgcctatctggctgcactttacagcccctacgtcgcaaccaactgctccttggcacggctgtgtcgcagccgcagatagcgttgtaaagtacagccaagcaggcctctatattgccatatatagcacagacatttaggatccccttctgagcatccctataatgtcccctgagtaactggtgctatctaaagttcccaccatattaccctaggaaacagaattggcagaaacttccatctgtgtcattttccatttcacctatacacccttgcattgcatccatccatgtgacatcccagcccagattagatgatctcattaaagcccatgaggagggacaaattcccccatgtgttgagggtgtgaattggcaccaacttgctagttagtgcgcacactgaccaatatataggccagggtgcgaaagaaattgtccattaccctgagtagctggtgctatctaaagtacccaccataataccct

SEQ ID NO: 50757 - DNA, 615 bp, Oryza sativa
agcagatatgggaggctggaagtaaatagaaaactcgttacttttgaaatgtggggagacactggaaaaacagaaaactcagaaagaaaaaaaaatagacgataaatattttattaaacgcgaaaacggaaaaactggagagaatgaatgaaaaatggaaaaatctggatggttaatattttaccatgctctttgatgaagatgagatggaaaagagaaaaaagaaatacgaaaagtgggtggtaaaaaacgaaaaaaaatggacggagaaaatgtgggatgcgtaggaaaggtagggtggtaaaaaagggaaaactagaaggagggagcgttgtgcggagctcgaactaatattccgtgcgcagtgcgcatattagcgccaccgttatacctctttagttgatttgtgatgcttagtttgaggggtttttatatttcaattaatattcgtcaccttattcgtttcgatttgtattcgtgtcgcgtctgtattcgattctgttttcatatccagaattccgatttcgatttcaagaataaattataaaaataaatatgatagagctaatatttaaccatatccgatcctttttatcataatagcttatcaccact

SEQ ID NO: 50758 - DNA, 683 bp, Oryza sativa
cgcattttctcgtcctgttgcaaactcctatctacatgtcagcatcaaaattatgaataaaatcaccgtgtcccgatgatatttttgcttgtgcttgtcgtttgcttaattcgttgtatattctagtgatttcctctctaataatgtgacagttgcttgtgaggtgttcagttcaccagagaatttagatgtcgagttcaatttttagtcggagccggggatgaagtagacgagttgatgttgtgttccagcgggtcgagcatcatcgcctcatcggtggcggtgacgcccggcgcgcgcgggattgcgacgtgatacacgatgaacgagcatcggcagctggatggatgctgtacgggcgctgtgtgaacatgatatgcacaccgctggcagcatccaggttccagtggacatacgtgcgtgatttctgatctgccctttgcttggccccaaaggtcttttggtgcttgggatccagacatgcagcacaggacaaaaggtacactccaaagtgcgtatcacaaagtgagaaatcatgctatttcgtcggcagttatcattttatttatcgagtagctagcttgcacgatactttcatgcttcgaatgtaacctagaatttatatattctatattcgcgtgaaattcttgatagtgtcgatatacaacattatgacattttag

SEQ ID NO: 50759 - DNA, 680 bp, Oryza sativa
gtcaaaatttgttcaaattcagtcagaatatgttaaaaattaaaataatttcagacaacggacccagaaatcataaattttttaaattttcggtaaccaccgaaattttggtggcaaccaaaattgcaaaccttggaaagtagtagtagttgggacagttgaaaattgggtggaacattccatctcttagctgaaactgagtactcactctgtaatctactctataattcaccaactcattttactcatctctcaaccttacactcttacaccttaacggctcatattcatatcaaacggtcccgatcttctctgtgcaatcccaccccatcgcggtcccgcacccacgccccagcggagagccgcgccccctccatctcctcgctccctgcctccccactcctgcgacgcgccaacgcctcctctcccacgcccttctgcccaaaccctaatcttcctgccgcacgggagcaggttccctctgctgccaccagctggtgcctccctccaccacagccgcatcggcgccatgcctggacgccaccgtcctaccgcccggaagcaggttgagcgccggggtcggggtcaactactccgtcaactgctgctcacacctccactgacgacaatctcatatccaaggtacactggggaattagggttcttggcttcgctatgac

SEQ ID NO: 50760 - DNA, 689 bp, Oryza sativa
aaaaggaaaaggtgaattttaattacttttccaattaagattaatcactgaaatgatctttgaattgttaaaaatacttgtattgctcaaataatttcaagaaaaatcttgaaaatacttggaccctcaaagtatttaacaaaattataatcagaccatttaatgattaatttaatatgtggataattactgaaatgttctttgtatgattaaaattaggagttgagctccgaaaaatccgagaaaattccagagagtatacttaaccatggagaatttaataaaaattaaatccatccatgctttatatttaggaaattttatttcccatatttaacttcacttgtaaattaatgaacatttaatataaattctaataataatttattaaataatttataaatcctaagacgaaaatcaggacgtgacagtgtgcaaccgaagaggaacaggggcggtgaaaattttttaggagaaacaacgtcgacaaatttttggcattgaatatggaaattgatgaagaagatgacggattacactgggaattgaaagaggtggtgtgaagcttgtcttgaagatgagatggaaacatgacatggtgtagacagcttcactggggatgacacaaggacgtgtgacgttagcataccgtaccttgggcctagccagctcaagtatgatgcgcaagg

SEQ ID NO: 50761 - DNA, 812 bp, Oryza sativa
atatgttaattaaacaaagtgtcattagcggcctaattatcggcttaattaccttgggcctatacgggttgaataggcccaacaaaggatggctgcaagcatatatatatatatatatagtcatgttacagcctgaagggagattggggggttgattttgttatcgtcgaaggctgctgctgccgagaccaaggagatggcgatcccatcttccactatctgatgaatgccacctgttgttagggttggaagctaagcaaggtcaggtgatcgtttctggttttgctgctggattctcaagtgaatcctattcttactgtttgtgctgaaagtgctcgggtaggagaattcatctagggttcgtttctgctattgtaaaccgaatccatctatattgtgatactatttgtttgctcctgagatatttaccggtctactatattttgggtgaattgctttattgattcaatcaattggctacggcgcatgcacacatatatacagtcttatttgcagctattatatatatttggtcgattgagacaaacaactagattctacatattttgtaccgtgaaagagaggggaaattagggtactcgctgtcgggtgctcatcaagtggtatcagagcgtggttgatcatggtacactggaatttttgtttgccaagaaattatcactgtattaaatggtgaagatgacagactacagcttcacgaaggagcttaggtttgtaccaatgctatgcacaagaacttctccgtcgaactactatgtatgggaagatgctatggaggaattcttacgagg

SEQ ID NO: 50762 - DNA, 670 bp, Oryza sativa
tgcgaaataactgctggagccggttaggtcagcgcggacaagtgtctggccagctgcctgcctgccacagcacacatgatagacagtggacatggtggctccccatctggggcgatggtggcactcgccccccctgcatgaatgatccaaatatataaatatgtcttagctaaagggtagtggcggccaccacattatgtaatggtatcatgtttacatgtaacacacaaaaattgattctacaatacaaatatttaatgaacaaggccatgatacactatcaaagtttcatttaatgcaaatatcttattccaaaaccaacaacatgacatctaatcaggagaaaaggaacactggaataggcatttcctgtccctaaaatccagcttcacaagtagtatcacataccaaacagcagttccaggtgagaacggagagggaaaaatatttaggatttataggcgaccaagcgagaaggtactggcaccccacctaagaggagaggttggcgacggtgaagatggtggcggcggttacattgttgatcagcacgggctgcgcctcagtcgagccgaggtaccacgtgaccacctcggcattgacccgagccgaggtaccacgcgaccacctccgcatcaaccccaaccccggcgctcctactgctcccgat

SEQ ID NO: 50763 - DNA, 628 bp, Oryza sativa
agttcatccatcgttgatgactaaatcatgtacttgagagcaacaaattattttatgtaataatcaggacaaattatttggttaataaaatccctaaaatacagtctgttcgacaaaagaaagcaagcagacatgtatataacacttccattttctagtaatcttattttccaaggacattttctgataatcttgaaaaatctaaggcttgataacatattgcatatccacagatgatttaacctgccatatttcattatcttggccctagcttatttgtattccacaaatttataaagtagaagcatatctgtatatctaacctcatagttcggaatatatacaaagataaatgcattcttcagtcttggtgagacaaaatgaacagttaagaagacagtacatatggtcaacatataaaatcactcacactttgttgtggcttggattaataatgtaatctgaaattatagtggaaggttcaagaaaattacaaggacaactggctttgcatagtataccataaaagtggccaaaaggaaagcgataactatttccccagtcgttaactcatgatggatcagcaagcaatatcactgaagtcttatatcttccaactcctattttt

SEQ ID NO: 50764 - DNA, 1104 bp, Oryza sativa
tggaataagttcatctggtctctaaacttgtcaacaaatccgattttcgtccttcaacccaaaaaccagatacaacggctccctcaattgtcaaaactggtgcaacataagtcccaaggtggtttggaaggccattttggtcaatgtggcgcctacgtggttcctttgacaaggtattcgtcccacgtggcattaatgtggcgcttacatggcaattcgatcccaaaaaaataataaaaaccgtggacccacatgtcagctacacacacaaaataattaaaaaatagtggggctcacgtgggccccaaatgtcataatcactcctccctcttcgtcctcctctctccccccatctcccctctctccaatcttcatctctctcccatttttgcacgtgatattgtagattgaaggtgcttaaaattagcccatcattatctccgtgcacttgcccgcgcattgcgcctccatgctcgggatccgcttctacatgcacaacttgacgcactcacatatgtagttctgccatgcctacgccgccggcaacatcgccgccatggcaaccaccactaccaccacaaatgttgcagcaactggggttcccgatatttcaatgagggagaggataacttcgatttgggggaggaaatgatgttagcggtctgactacaactaccataggggtgctacgtcttagcaaccggtacaccaactccactccattgtcattcttgtcgtgtcaagaacaacattgaacctgcaagcaataaaataacaagcaagaacaaattgataaggaaagaactcacggcacttgtcaattgatgaaattgaaatacatgaatgtggggttctaaatataggtatacgggtggtctagccgacacatgcgagtacaaggaagtagctgaagctaaacttacatataaacaaaacctatgttacaaaggtgattgctaagggtttatataggtggatgaccaggagggggtggtagggagcaaaccctagtctttgtggacccctaataggctatgtgaatacaaggtctaagcccaaatttctggtccgaatattatttttattattctaggcaactccact

SEQ ID NO: 50765 - DNA, 690 bp, Oryza sativa
agtttgtatcgaaagaaccaacaacagctagacggacctggttacataatggtcaacatagacaggcacattaatacatcgtgacatctatcattcacatatggcccctcatgtgtctatgatatatgggttcagtgtcaaatccttaattggcacttgtaagagtggcaaatagttaaatatttccattcggtctatctgttacgtgcttgtaaataaattgctgttgtgaaatatttttagaatgtgtatagtgaaacttccataacttttacaactacttgtacaaactgatcctatttagatttaccgtctgaggattttaaaattggatttgacagccctcacgatctttttgcatgccaacatccagtctaacctgattagatatgcagaacacatcaaattgtgatagtcaggtaatgtatacgatatatatgggtgggaacaccaactgtcattttggccacaaaggaattcacttggcttcaatccccttcacaccactagaaactgcataattcactaaaacgaccatgtgttactacgttgagttttagttattataaacttaaaaaatagattaatctaatattttagagcaactttcatatagaaagttttcgcacgaaacacaccgttagcagtttgaaatgcgtgccacgaatatctaaaattttatccaccctt

SEQ ID NO: 50766 - DNA, 519 bp, Oryza sativa
tctctgcttcatctctctccgcacgcgcgcgtcattaattaatttgatggtagcgttgaattctttaacactcaaacagtttacatgcttattctcgcgaataaacaaattaacaaacaaacaaaacacctttttacatcatttaacgacatcaaagctatatgctactccgtatatgccttttcgtgagctataaattaacacatgtagatgagcaattgtaccgaaggtcgttgcaacaacgacatttttaccccgtggctctagctagctttcacccagtttggtccagtgtcacatcatccccaattgaccccctctacttaattactccgtgccaccttatttgacatgattccacattattaaacaccaactcgatgatctcacacaaacattcatgaatgacaaaaaaccccttttaattatgccactgctccctttttgctaacctccttaatttgcacacaatgcaactagctaggagtagtactacctccattttttaatagatgacgc

SEQ ID NO: 50767 - DNA, 763 bp, Oryza sativa
tagataaggctcgcttagaggccgggcaatcaggctagtctttacatggcacatcgcattaacaacggcgtgtgatgtacgtgcgcttgcattatttattatattttggattttggatgtgcatgtcgttttaaaattttcttcttaggaaacttgggacggatcggtttcggtgtatatttctgggcgaaaggaacgggcacagggttgctggagggtaccttttgggggttggaggtacgagcaattctgcttaaaatattggaggtacaaattaaggtcatgaggttgatttggtttaagtactactatatatatgtcgacattttcttcttaattttgccattttaatagtttccatgatcagtctcgaaggaactgctggctttcacccaacgtccggttttgactttgggcgtgtgtgtaggcaaaagtggcaaacagctattactagataggaagctgcactacacaaagggaggaggagagatgcacaaaccacagagtgaggtaccatgttaaggtcagagtcgtcatcacaggtgtcaaggcattcacatacgattcaatcaacttctctgtatctcacttgtcctccgttgctgttgagccatcgaagaggtcagactctcatcagagtcggccaggactgtttaaaattaatctctttttcttttcatcgccgtgtttgagtgtcagggttgataagcatggcgatgggtgcggttgtgacttgataaatgcaagtcaaagggctgcagga

SEQ ID NO: 50768 - DNA, 600 bp, Oryza sativa
atgcattattgcaaattgcaggggccgtccagtcggttgaagacaacgtgtacaacttggtacaacttcactggccgtgatcgacgggacgatgcacgaggaaggagtataagtatacattcttgtgttaaagaaatagagatcagcaattatacttgaatttaaatcattgctaaattgtctatagaaaatactctgttaactagaaggaaaccataattaacaatgcgttttataatcggaattgtcagggagaatttttttttaattctctttgctttaaatcattaacaggacattcagaggaatattcagagcagataaagtaataatgttaagttaaaatgccaggaattgaattaataattttttcctctccctcctttggtcgagaaccatccccggctcactctccccgttcgtggttcgtcgtaaacgccaacccctttgccgccgcttgccgcgctgctgtgcgccgcagcttgccacgctgctcctgtgcaccgccaccgcactgccaccgcgtcgcagccgcattgccggctgtgccgcaccaccgtcgctagccactaaccgttcgttcgcacgtagtatagatgt

SEQ ID NO: 50769 - DNA, 590 bp, Oryza sativa
caaaaaaaaaatatccaagcgatttcatacaataaatttcatcttaactaaaccgtataacaataataagattaaaatagtcttcactcgttttaacgcacgagtatttttttctagtctaattaaaaataaaaatagtacaaatgaatttaacgttgtatataaattgagaatcataattatttatctatttaaaatttaaactattttgtaatgagttgttagaaaataggagaaaaggggacggtatatggaatacgtcacatatgtacctactccacttacgtacggtggcatgtacggcaagggaagggaagggtacaaattctgtgagatatatctaatagggatgtttttcttttttcttaaaatttctaggattttttctaatttattagagtgccacgtggcgacttaaaagcgtttgtagagcgccacgtgacggcttgagagcgtttttatgaagtttaatgcacttttaatatataatagatagatagatttctaacgacttcttttgtattttcaaaaagcaaaaaaacttaaaatccgactcaaacaaacggattagtatttccaaaagtgaatga

SEQ ID NO: 50770 - DNA, 736 bp, Oryza sativa
tcctgcagcccgaaaaaattgagtggtgaagggttgtgattggttaagaagagaatgtttgtgaagaagttgttatattttgggatggagggagtaggaaaaaaaaagaagatggcagtcgtaggtactgcaactctaccagcactaccagctgcaagtcgtctcctcaaatactccatacgaaaatatgttgctgtagaagaacgagctttcatactactcatcaatcaaaaaagaaaacaacaattggataccactgtatataattttgactaactcctaacaaagcaaatacaacaatttttaaaaatgccgaaaaccccctaacttccgtataacctgaaaaatggtccataaaataatagtgttgtaatatttctaattaagttcatatgcgtgtgcataattatacctaaaaattctattataaattaaaatttgaaattgtaaactctatatgttgtactctctcctttttaatatatgacgccgttaattttttaagatatttttaaccattcatctttttcaaaattttttaattatgatttattttattatgacttgatttatcgtcaaatattttttaagcatgtcttaaatatttttatatttgcaaaaaaaaaattaaacaagacgaatggtcaaacgtttgtagaaaatcaacggcgtttatatattaaaaaacgaaggtagtaacacttaacaaacaatgtgcaaggaaaaagagctatat

SEQ ID NO: 50771 - DNA, 838 bp, Oryza sativa
agaccaagataaaaatgtttgttggtgttatgaagctctggtactaaagctccgtaggtttctgttacttttgctagtagaaattgacgcgtgctagggtactttgtaagaagctctttatattaactagaacctggggcgcgccgttggcgcgccgcctgggcggaaagatggtgaaaaagaagtggataattaggagatacaacttcatacgccgggtgcaacgacttcattcaaccagctaataaactgatggtgacaatgtaacttgcaattgttagagagtaccgggccgcaactttatttaagtttcttgtaaccggttgcttgagcacgattacaatagtgagatcatatgccacagctccatagtttgtgtacagataatacatcatgaagcagaattggaaaaggaaagatctatttacagagatgcctatctcttctagaagggggaaaaaccttaattcctttcatgtgaagatgcttaacaatgcgctatttccttcatctgtacaacaaaagaaaagcaagcattaatctacgcaggagaaaacacatcagcgccatatatatatatatatatatatataaaccatgagaccgtaagaaaccatcgagggagcaaccatgtaaacaacaacgacgtgaaacctaaactaattaaatgaaacacaacatatccaactaagtgtaatccgcaaactaaataacaaaataatttaagaaatgaacatggcacccacaaaactgtcacagtgcatctcctcaagaagcaaggtccaataaatgatgattgcctgtaacgctccagcaaatcatccttaccctagctaaa

SEQ ID NO: 50772 - DNA, 530 bp, Oryza sativa
ataatttgaaggcatcctctcctaggggcgttatattgatatgggcatgtgaccgcttgttcaagtaaaactagttcatgtgggtatggggagataacacatccttccttactgggaaaggagtttccgtctttatttgcaatattcatatatctaggtatacctttgtgtgtgtgtataaatataaatatacaatactaagtatccagtattttcggtggttactgttaggatacgcgtaggctacgatagcataaatcaaaattttctatcacgtaaaccatgaaccatgcaagtatttgatcatagatcgttaccactcgacgtgctgcgcagcggaagaagacactgagaagtcgaaggaattctcgcgaagtagcgtgcgtcgatgtagaggaagtagtcgatcgcaccggctcgaccttctcctcctcgtgcgttctcctcgccgtactcccacgccgatcagcaccgcaaaccagcggcgcctctatcggtatccacacgtatagggacggaacgccacgcgc

SEQ ID NO: 50773 - DNA, 529 bp, Oryza sativa
attatatctatcggattttaattcaaagattaaaaatctgtgtgatacgatcataaaaatctttcgaatataggtactctcaaaaaaaaaactagaagctagatgggctctttgctcgcctctaatgcggactactcaacgctgacgttgaaaaaaaaaattgatcaatatataggaactcaatcggacagaacaaccaggacgaacgaaaaataggtaaatatatagataaaaccgattcaaatatgaatatgaatgatgtaacaaaattctagtaaaaacatctttaatttttataatagtagatagattttttttctccggtaatttttacgggattttttcttcatcgttttctaaaccgcggtttcttttttcgcgtgactttttttttacggtcagttttttttcatctttttctcgccatttttttttccgttctagaccggatcggactttttttttcactgtttttctttcccgttttattacaatgcgttttctttttcccctgattttttttcttccc

SEQ ID NO: 50774 - DNA, 693 bp, Oryza sativa
ttcctgcagcccgatgtaccatgatcaatggcactactggaactcgccttagatttagcacaacactaatgaggtaaattagaacatgaacaaccagacaactaccctacccctgcatcagaaatatgaagttgcatcgatgagtttttatctcagccgtcataagcagtgaagaaaatcaagaaaaacttgtaattgtaccaacaagtgagatggacagatggttgcacctcattaaaaataataaggcccaaacctcctctccccacctgatgctggcctcctcccttgttccccatcacatagctccagctgctgctgccatctctcctgcgcgacatgttcagaaatctggccaccctcactgtatgcaaaattgaagctcatcagaaaagactgcaacaaagaacaaccaagcaactcctctgagcatagccttgccacctcttaattatcattgcatagtgatgtaaacacattcatgaaacaaaaaaattatccacaggcagagaaacacgcaacctttgatcacgtgaacacgagaaaggatcagtcattctgtgcaactccattatcctcatatacataatagaatccgcacaaaattggaatcatgctgcatcagtaaagattcggggatgagaggagatttcttcccgtaactcaccgagatggccactgagaagagtcatg

SEQ ID NO: 50775 - DNA, 592 bp, Oryza sativa
tgatttgtgaatgaatcggataattcactcgttccgtttttctccgattgatgtttgcatatggagacggtgcaaactgagccgccgtacgtcgtctccctgcccctccggcgacacctccaccagttcggcttaggcttcgagaaatctgcgatttcaacaatgccgcgtgtatatatagagcagaattcacaaggattagccattaatcacagcaagctaatcaccgagttcaactccaactccgtctccgacgtgctacgtagctagcttcattggtttcgactcggagtcggactcggctgccgataaatcctagcgctgcatccaccacaattccttccaccccatcctcgcagagtcgcagtcgcagctagcagcgctcgtagccgtcgtccatggcgcttccccgccgctcgagtccccgctcctcgcgcccgatcatccaccgcgccgtcgacgccaaggggaagaagccgtcaggacgatcgccggtcaacgagatgtccttcaagaagggcgacgaggtgcgcgtccgcacgccgttggggaggctaggcacaacgacgctgcgcctcgtcatgtggctcgg

SEQ ID NO: 50776 - DNA, 562 bp, Oryza sativa
tttttctagggaagggtattttttcacccgacactctacatccaacaaattatgttaaaaactgcatatataggacctaggacctcgatgaatagtttttttttttttgacaagggtatttttatacgtgaactcttcatccaactagacatatgcaatattttagttatcaaataacccaatctaaaatcgctcctatgaagatttgaacttagaaccttttagctctcaaataacccaatctaaaattcgctcttatggagatttgaacttagaaccttgggtgctactcaggtcactgcaaccactaggcaaatataggacattgatgaatagtttaggcacataaaaactataaatgtagcaatgacaccctgctctcacgacacacaaaaaaaagttcacgaatatgtgcttacgtcacctagacaggctgcaaaacaaagtgatagcaccgtcatacttgtcatcgaagaacattgtaaatattgattagatgttatgcaggtatcttgattcttgcatagttgtggacgccacaggtacccaatctcttgtggat

SEQ ID NO: 50777 - DNA, 749 bp, Oryza sativa
cacgcagtcgctgacgcgtctcctccttggcatctgacaagagagaggggtctgagaggcgaaatagataatgaggagcgaaatagataatgaggagagagatctgaaaggtgggccctatcaactttttaatagaagaattgttgactggactgccacgtaggatcaaaatcgcttataaagctacccgtggtggttttttatctggtattgatagttaagggtgaaagatgtttggtttttaggtctagaggggtaagtcgtactcacccaaaagttcaggggtgtaattcaaactttttcttttttttcttaggtagtattgtgttttatttgtaaatttcatttgaggtgaaatgtcaataaatatactgggaaaaaatggaagccaaacagaccagaagaaaaaaatacataaaaaaaaaaagctgagccgacgggaagtggaaaaaaggaaagcagaagtctctcgtttattccaatcttctcagtctctctattccccacgctttttacaagcgtcggctcacctttccttttactttctctatcgacagctctatcccaggaagccacaaagccagctagcaccaccatggttttgcctccctctcgaacagctccacagcgaggtgatggtttccttttccattcctttgatctggagtggatgggctgagaacgcatatgtttattttctctttttacttttctttttctaggatttctggtgcttggtgaacagtgtg

SEQ ID NO: 50778 - DNA, 708 bp, Oryza sativa
atcgtcggcagaagaggcttgttttccaagtaagttttgtttttttttccccaaaatgtgtgtccttcgcaggatattactgactgatgggtattgtttggtagagctttatattgaaggttaagtttctatattgttgatgggtattgtttctttcttgttctttacatgtagccactgttaggagtctatattggttcgtgacttttttttagttatgcttgtttaacatagtttgatcggaggggcagaatctttctgttgcacagccaattatttgtgttgcatttgttggggataaatcaacagtagcatctgataatactaacaataaagtagtgagttggtctgtactgcatctgttgatgctcatttttccacaagagtgcacaattattgtaggctcaatatcttgctccctccatctgcttttgatagtcatatttccaaatctgaaaaatttatttttgataggcatatttcaatccaacaacctatcctcttaatgactttctcggatttaatgcgtgactctccattctttctttgatagtcatatttccaaatctgaaaaatttatttttgataggcatatttcaatccaacaatctatcctcttaatgactttctcggatttaatgcgtgactctccattctttcacacaagattggctacatgggcatcgagaaatgcaaatattaatgatt

SEQ ID NO: 50779 - DNA, 667 bp, Oryza sativa
tgtagccttggaagtgtcctaatgggcctttctagcactcatgttggttcatgtagaatagttttcataccacataagttaaaaatctaatgcgtgcagcttgaattaaataatgacgatttcccaactccctatttttgttaatatgcttatatactccaacgatatctttattcatctactatatatttataatttcagaatataaagatggagctttgttaatctaggtgagggggagggggaatgggatgttacttcgttttttatatagtttgcctttaaatatagatctaatggctgaaataatgattttatcgaggtcagatgcttcgtgcttttagaatttctgtgatttttattaatttttaagatgtgatatgtagctgcttatgagagtagaatgatatatcaaatggttgaaaataatacgcctgccatttaagtgtgaaatgatggtaggatgttttgttttttctttctcatagaatttcaaggatatttcttaatttttaagttgtgacaggtgatggtttgcgtcctagatgatactcctatttagtgtacatatttatatatagaatgatttaagatggtataattattatcatttttttatattgtttaatgactgccacgctagggtctatgtccaaacgtatttcag

SEQ ID NO: 50780 - DNA, 1162 bp, Oryza sativa
tcactgcccaacactaaaccacgttgcaacatgcccgtccaaaccacttgaactacaccagttcattatgtcatattattaagaataagactaatcacggcgagctggttgaccgctcaataaccatgggcacggctattcgaatgttttactctgataagaggtatacaactttacccataagacacagcctcacaacacgttactgtgcgccgacatgctaccatgacataccagaaagaaactgtgacagaacctttcgcataaccctccctaaccaagcatacccaccgtaggtttcacctccactccttaaaaaggcagtggacagtcccctctcgtgcctaggtaaatccagaaacagtagagaccagagccaagtccgaattgcaccatctcctctacccttgccatggtatgttgattaggttaggctacactctagattcagcctggagcccatgctggcctttgataagtatgtgtttatcttctagggactcccgagaactggtctttaattgtcatgggtacgacttgcaaaaccatgcaaccacaacccaccattaaagcatattttagtttaattaaaccataaccatggcggtacatcatcatataattaaggactaatttatagcgaatcccattgtgaactaattaaaagtgcatctaggcccctaatgattttgatgattgattacaatgcgattagagaggactaacacttttattcaagcaaatgtgaaggttgttatgtcctcgacatgttgtaatgtgatgcatatctcgtgaatgcgacatcacgatgcaatgcggcaatgatcaaatggtatatgtatcttttaccttgcattgtgtcgtaggaatgccgtactattaagaggaataccacatgaatataattggtagaacactagtgctcaaaatgcttcatctttgtgtgagttgaaaaacctaagccaaaatttcaatcccgagttgtttcacttgtcacaacacttacaccgggtttctttgcaagtttttcaacatctcttgaaggttttggaccatgttttatgttgggtttgatagcccacgaaactagctttccatagagtccaagatcttagaaatcggagttcggagtaaaaagttattgctttcttacttgagcaac

SEQ ID NO: 50781 - DNA, 752 bp, Oryza sativa
aacggaatcagccagtcagaaatacaatagtccataatacctccctagctcagcccaattcagcataatacctcccgtagtccataatacctcccctaacctagaggcttagagagtagagagtgaaggactgagagggagagtgaaggactgagagggacatcgaagattccagagctgagcggcggagcgacgcatccagatctcacgtcgcctcgtccccctccgtctgtttgaagtttttgtccatcgaagtttgaagctcagtttgagggtttcttgtattccgataaattttcgttatcgtatccgtgccggttcgttttcactccgttttcggtttcgataatattcaattccgttttcatatccggtgtttccgattctaattctgaaaaaaatatgaaaacgaaaacgataaaggtagtttccgttcgttttcataccgttttcatccctagtgataagggacaatttggtccaaaagagaatgacaatataccgaaagggtaagtagttacatatttccgatttcaaacaaatttataacgacatccttttaattagatggattgtaatggtattttttcaaaaccgttaatttatagagatatggattcaattaacccaatcaaataactctaattaacaaatgctaacataaataataattgtgttaattagccaaattaaacctttacaatttatgaaagtttctatcaagttattttaggcaaataaaaatgaatatg

SEQ ID NO: 50782 - DNA, 677 bp, Oryza sativa
tatatgctgccaatatgtccaggtggaccgttaatggcgacaactcagtacaggtattcctccgcgcgtgtatataatcctaagttactttcctggggagggtactcctctgtatttacccccggttggatggtcatgacggattatcgtaagaaactctgcaatcaggggtggcttctcaaagcaccaggagggcattggaaagagggtattagctatcgtataattaggatgtatgtataatgtgtatgtatattagaagtgtaggaacagattctttctattttcttaccgcttagcttagatgatttattatgagagtatatagttctcttgccgtgtgtcactctaccctattcattatcttaacccttgccgtatgagacattgattattcattatcttaacccttgcctagacatgtgtctagtttcattaacatctatatgtatgtgggcaatgctagaaagtcttacattatgaaacggagggagtataaattattagtatacgatacccttggaatactctcaggtgaaatactataatggtatatccgtgcgattacggatgaaattgtaccataatatacccaagtatttcggtgccattgctgggaattatatttctagtaatgtcgttaacaaataccaacatatacgtggtgtctaggttgt

SEQ ID NO: 50783 - DNA, 669 bp, Oryza sativa
agaaaaatagtccaatttaacttgatagatcaaatttgatttatacttctcaaccgtaaagcctagtatatcgactcctctaactactaaaataatgtaaaatgactttcttagcagtactgacaatggattttgctgatgtgttgtccacgtaattaacagcccaatcataaaagaaatttaaaaaataggcatcaggccaaggtgtaatagactttcctctctccgcttgtctcatctttttcctccggaggcggtcccctctctctttctcttggcggatgcagaaagaaaccataggtcatagcttgagctgggctagcttgaacattagcgtgctgtcatgttaaggtgtgccagcttgcacgtccttcacctccaccaccaggcatcgtctatcttctcctcgtccaaggcctcttttcctaggctcagcacttaccatgcgcggtgaggtgatgattgcgcttagatcctcgtgagcctgacggatacagatcgatgacgaggttgttggcttggatggggttggcgtcagctgctcaagcattagcgacacgcacgactcgacaaggggatggcgcctgaccgctacgcttcgccatgctccccaaaccgttcgtggtacatgctatagttccacttgtctgtgtccatgaacgcgaagtt

SEQ ID NO: 50784 - DNA, 1317 bp, Oryza sativa
gacagtgaagattgaacatgggaagagataaaggaagaatatggagcaggaagaagatggaagaaaaacgtgacggtagtaatacggttttaattttataaaattttaatggcatagctgtgaataaacgaattataatgatatttatctaaaatgatatatttaacatggcatggatcgaattaattaaccattttttaatgattgtagtgccacgtagatgcaagtcaatgcaacacgtggataccatatcacatatcagggaaaaccattgttaatattgtcgagggagtcattttacgctagttttaacaaccattatatcccgttttgtactttagggtacgaattagattgaacctacatgaaggagtagaaatagactttattttccttgtaagggaacatagggatgagatgggcttgcctgtagaaattggattaggtgggcttgttcgtaggaattgcgctgggctgttttggtggctgctaagtattgtcaattcaattttgctatatatttgtcgataatttttctttcaaaaatttgacatatgtaattacagtaaaatcatagtgtgattacactataacttgcatgtaacttgtatgtaactttcaaaaatctctccgtaacatgttgtttcggtaaaatggaggtcgtgggaacaaatcctttcacatatgtgtgtgctgtgattttttttcttccttactagaacaaatcttgtaatagatctaacgattcaaaattacatgaaacttgcatacaagttacactgtagttacatacaagttacagtataattaaatacaagttacagtgtaattacactacgattgtagtataattacatctgtcaattttataggaaaaaatttatcaataaatgtataggtagtccctggttaatttcaatcacaagtaagatcatataaccttatttctagcattaagattatgtgataatcaattaatgtggaatttgaaaccagcgcactcccataaactagccatgcgctcccattggttggttttggaagaccatgaaggaggtggtacgtgtttttccggcggtgttaggaaaaaaaacgaactaaaaggcgagtcttataagacatttagtgatctaggaccaaacccatttaagctagataacactattgtgttttgctccataatatatggatgaatatatttgggttagatgttatagaaatgatgaacggatttgggttaaaatattatgaatattacgatgtgagaagaaataatgatttgtcatactatgctaggtttaaaaatgcaataaattg

SEQ ID NO: 50785 - DNA, 529 bp, Oryza sativa
atataagaatattgtaaatctgtatcacaaaatggttgtacaaatgaaaaaaataccggctcaatcacatacgagtgataaaattactcgcatgtgaatcaaactagaaaaaaatgattcaactaaaaattcatcgtgaagctgggatcctgatggctttgctagatcttgctataaggatgaagagactgatctttgccttgtgactggtagtggagagggcatgttatgcccagaaattcgactcgaatttcaagcagaatatgtattaaaatctctgtccaggaccagacagagtacacaaacaacaaattgatacatagatccacgtcttacaaaaataataaataattcttacaaacgcagcggaaatgaacaaaacttctaaacttaatcttcacaaccaaagcatagctttctccataatccacaggcatcctcaacgtctggaacaagcttaatcctcgtagaactcatcatctgaataattctctacttctggggtggggataaataaagcaatactgag

SEQ ID NO: 50786 - DNA, 681 bp, Oryza sativa
cggctcgccattgatgggtgctagagtttttctgcggtgagtcacgcgcacatatacactactacaccgttcttgttgtgttcatcgatcgaccaaaggctagctagctagctagcacagtaatattgatttccaattccaacctgtggatgaattcaagaaagcattgccgatgtgtgtgtgctcttgcatgtatgtaccacgatcatatcagaaagcttcaaaacaagaggagaaaaagaaatgttactagctatagtacatatagtagttgtgttgaggagagaactaattaatggatatgcctgttcctttcaaaaaaaaaatcacatcattctttgctatttgttgtctagtttaattatctccattattacagccaaggcatcctttggaattaatgtgggattttatcctattcctacataagccgaactgatcactattgttcatttcttgtgtttcaaagaaggcggaaatatgtatggaataagaaaaaaataatgatatgcgcatgcagtgcacagtcgctgtaacttgcagtaaactgtaactatctcagctgtacatgttgctagctcaagtggcgtttttgcttcgcttcttgggaaacggtttcatggtcgttaagtgagttgtacgtcgcagggatggtaggggatagatcgatcgatcagattg

SEQ ID NO: 50787 - DNA, 1129 bp, Oryza sativa
ccatccaaacttgctcctccgccatgattttctgctggtggaagtatgactcacagcgattaatgaatacgagcggatcggacttgccattatacttgggaaaatcaagtttctggaagcgcggaggtggccggtcggtgttggtctcccccatgcccgccctgggacctgaggacgacgacttgtcggcggagagtgcgaggattgccttggtgttggccgccgcggtcgcctggagggccttgacggtctcggcgagctgcgcgatggtggtcttgaggtcgtcggtgtcgctcatggcggcagcgcaggaagcggatgaagacgaggtaggggatgttggcacggcgggcggtgtaggggaggtggtgcgggaaggagaggatcgccgggatcgtgataccaggttgtcaagtgcctcggcacccaacgacgctggaccgcgactacgtagctcgtagctgcgctccagtcctcaccgcaaggttttgcccctcggctggtggcttgcgattagtggagagagagattaggaatgacaatctattggctgcccttccaacgagactgattacaggattatatggccactggcctaaccaattatagaaggctatccttaattctagggacaccaaaagtagcagcagatttcttctttcctttcttcagccactggacgtcgccgtcgcgcgctcggccgctcggcgcatgtcacgcctgcgcctgtacgtgcggccgtacatgacatctccccctccgtcgaagtccagctcgtcctcgagctgaaacgctgggtaccgggcgcggaagtcgtcgaggtcttcccaagtggccgactcatcagcctcgtcgcgccactggacgagcacctgccgaacgccgcgagccagacggccacgtgtgacgcgtgcacgttctggaaccaccaccccatggagagtacgaggcagcgccggggtggaagtgggcggcctgcccacaaacttgttgagcattcctacatggaagacatcatgaagacaggcgcccggcggaagctgcagccgcacggccacatcgttgatgacttccgtgacgcggatgggcccgacgtatatgaggcttcagtttccccgtagtggtgcgc

SEQ ID NO: 50788 - DNA, 1311 bp, Oryza sativa
aactagtgaaatgataagcatacccaacagcaacctgttatacaccgtaatcatgcatctagcatttgggggctggacatgtttcttttcaaagaaccgtgcataaatattcttgtgcactttttttttcaccttttgaaactccactaataacataatgaatatcaaatcacatctttgaacaagaaagacaggcctcatgtcatgtcaacacataaaatagttagctacttaatactacagtgaaagacagccacctaaatcaacagattagtagttatatggaactgaatgaactgacattcaaaatgttttatcctttgaccaacagcttaaaagtttaagtgctggattttctagatgcgctcaacagtcaccattaagcagcaaaaaagctgcatgcttaataaacatgacttagaggttgggatttgggaaagggtgcaattgcactgatatattataaacaaccatctgacagaattaattgcgaataacagaacattgctagcaatcaatttgtgtaattccaatttgttcaaatctccaacatcttttttttttctttttcagtagcattgcagtataccagagatctagatgacttctcaaggttagatgagacattggtactgctaatttggcaatagcttcataagtctttacctttcaagagttaagacctaattattgtgactaatcctgatgtctgatggcacacatactacaatccagcagagtatgtatcacatgagacaactaagatgggacatcagctgcggcattaaacccaacagaaacccaccactcttcagcatctccaatcgaaccaacccacattatctaaaaatcgaaacaaagaaaaagcacaaaaatagccaaggtaccataccaggatgctcccaagaaccacttccaagaacagtccccccagctcaccgagatccaagatggaggtcacgcaaccgcagatctgccacctccctgcccacagcaagaacatatatcagcggagctcgaccaagcagagagagaacgccacttcaagaaacatgaaagatgagtcaccttcttgagtgagtccggcgactgtggcggcgaacggcggtgacggcgctcggcggtggcagcgaacggcggtgacggcacgcggcggtgacggcgcgcggttgtggcggcggcggcggcagtgcgcggcggcgcaccgcgcacaggcgcgtgcggggagtgtagggtttggaatggagtggggatagtccggtttgttttggaggctaacccatgggctgaatccatggatagtcttcacag

SEQ ID NO: 50789 - DNA, 674 bp, Oryza sativa
ccattagatgtcacaccctgcccctgtatatataggggtcttaggaggagatagaccttatctctactccggttcggattggcccacaagaaacttatctccaagagatttgtttcacaacactcccccttgggctaatccacgaccaactcatgcctcgtcaaaactcctaccaaaacccagtgggaaaaaggctaggagaaagtgtacgtagttatcactcatgcattgcacgttgttgcctcgttaaaaaccttatgtgaggagcaccaacttcactcactcaagggaaaaagagtacgacactaaggactgcacggtccatcttgtgggtcatgttctagggtgctctccccctgaacctagcaaacatcaaagtcttctcatcccgattctctggaaaagcttccgagaactaaaagctgggagagactaagtgatcaatcctctagattatcactcaacttgaattgctactcacctcacctcgcctcaggagtctgtgaggtagcccacttgtatttggtgtcggtcaataaagacatatcttattatgataggaccttaggaacaggtctaagtgatcgtcatcgagtcaatgccctgggcatactctaagacatttcaatgtctcgcaaatgacaatcaacacatagcacatactccccctgatg

SEQ ID NO: 50790 - DNA, 752 bp, Oryza sativa
gcgcctgctgcgagtcgtatgtatgaagcggtatttcagccgccagcgctaactatgtgtcttacaggagtagttggttgatgtttgctgggcaattagcaaccatcaaacaggtatacagaacaacagatccaagtcagggcagtttcttggggtgtcagttctcaaactggtgtctgcacacaacactccatctggaaaactggaaactaatactagtaagttcaggatacggagtacgttttatctggcaatggctgattttgaacgacggcgcttctggcatggagcccagtgccacagtttgcgagttggagccttggaggcatggagccctgtaagaccaggaacaatcttttggctatacgtgccacagtgcaagttgcttcttgtgtgttttttgtgggtcccactagtaccagctttactatttttttctctctgctctctctcatgtccaattttccccaccgcacagagagtgccgagcgcatcgggcggagcagccaagcgcaacggcgccgaccggaggggcgacggacctggtgctcgccggcacaccaccctcatctccctccccctcccccatgcgaaacaacagcgagtgcttgcgcgcagaagaggtggacaggtcggcggcggaggaatcggcagcgacggcggtgagggcggcgagatacaccacccctctcttctcccaaagcggtggcgaggggcggcgagatccactgcccctcttctcccccgaagcg

SEQ ID NO: 50791 - DNA, 703 bp, Oryza sativa
aacataattcatcataacaagcctttacctcttgttgaagatcaaaaccgatgcagctcaacccgaaagcaagaactcgtcgaaataaaactaaagcaaaaaggtggcgatgcaccgagattgtattgaacgtgtgtgttaaaagttacatagggctcgggtctatttatacccgaaaattacaagatatgtccataacggacacaacaactatctctaacaaactctaagataccataagcctttgcgacagacttttgcccaagcatatctctaaggaaattacataaaacaccctaattaatagatacaattgccttctcaggactctatccatgtgcggcaatcatcttgaagcacctcaatttaacccgatgtcatacatcaagttgcattgtcggaatcggctgcatcggcttgcctagcccgactcagacccagccgatcctaatcgtagccgatctggactccagctgatttctgctctgttttcgaactcgatctccgcctccgactttgcttcgatctaatcttctttcccgatgccgatattaccaaatttggttgttaacacgtgtattaacggtgtagtatatttttatagttagctactgtattaatggactattagattagctatagatgatttggagccaacagttggctgtactattaaactcttaagaggttagctagcccaata

SEQ ID NO: 50792 - DNA, 964 bp, Oryza sativa
tggggaaaagagtatttccctgcttaatatctctgatttgtccgtgactcggtgtctcgacaaaattaatttgatgttgtagatgtcgatatattttctatacttagttaaagttaggaaagttttgacttatgaaataaataaaattgtcttacaatatgaatggcattaagggagtaaggcagtaagagccatgcattagttctcacaaaacatattaaacttctccaactttaaagccttagccagcagtgcaccattcagccattccactattccagcccaacagattggaagcaggaggcctaattcccaatgaaaatattcccaggcggctgctccgtatgacctagcgtggttgaaggccttgaatggcgtggttttatttgtgaagacagcctttgaattgtgccaggatagaacaaaatgaagaagaaaaaataatattcaagttagtatagtaaagtacttctaacttcaccaggactcaaaggatgttcaatctttttctattttagctatttcttgaaatttcaatgtctaattaagttcttaccagacagtttgtccgtaggttgtagtttctaaatattgtttaattttttcagttgatataaggtagtcaattgggtataatctccattgaacaaaatagacgatggaagttataatatttaatttctccttttatcaatatgttcatatgtattaagtttttttaaaacaaatgtgttacgttgttaagttatgaataggaaaccggtaaaaaagaagtcatgaagagcaaggaaccagtagattttcaccgagctagcaaagaaatgctggccaaatttattaacaagagaagggccgtcatcataagaagaggaagaaaccaatagattgctttatattgagaatggtttagctcctagctaaggtctcatcttttctcttatgcttatgcttatcagctaaaatt

SEQ ID NO: 50793 - DNA, 1640 bp, Oryza sativa
acattggcacagcgttcgttcgtaagccaggtcgatccggtggtttttcttgtccatggttttggatcatggaaaaagacaggtttttcgtcccagggaggagagaaactggaaaggcataagctggccggccctttctatgtatgtaacgcattacgcagagatggaatcgtagtttttcccgtacgttaatggtggtgacgcactgacgccacttgggatctgcaagcgcaacaaaagcgcgagttgtcttggtgctggagacactagcgcaggcgcggctagctctcgctgtgctagctagctgtactgctgtatgtacacatgatgagctatacgtcgtacagctctacagattaattttttcactggctggattccctttttttgcatacagataatcaatgcgatgcattttgctccgcgcgcgtgcatgttattatggcaaaagtattttctacccctaagtgccatggcatcacctaggtgtatgcatgcaatttaaaaagttatataaaaattttataaaatttgataagatagattatgataatataagacactatacaaacatgcaagtctaaattcgatcaacaacatatgaagaaacaaaaacaacaaattttatctacgctgtatgggtactattcactgtctgattttattatttttgtttctctagttgtaaatcaaatttagtcatacatggttatgtatagacttatatcatcacaatcgatgctactaaatttttttaatttttttctataactatttgagtcacatataattgatggataccacagtacttaggtgtaaaaaatccttgtccggaaggtcacctaaatccttgtccggaaggttaggcacaaatgcgtgcaccgtgcatcgatcgatcatcagtagcaagtgccaggtggtggaaaaaaagtcataggaggacaatctgttcgtccttaggcttttacgtaagagtatttgctttcgtattttcagctcatggtccgatgaatcatacgtttgatccgtagccacatgcacgcgcgtgttgtcgtccgtcgttgagtggtgaatcgcatggtcttcgcgaaaatcacatggaatggaaatgcatgggaacacatctaaaaactagccagcgattttcccatgggctttgctcagttttggttgtaattttgcaggacgatttagctatatgaatgtagtagtacagtgttacgacgatgaacgtacgtgaacgtgtacgcttccgtagctagcggccaagtttgacgaggaggagtcctttactataaccgcaccaaatgtgcgacctcaaaaggtcgcaatgcacgcgtgcatgcaactcgctgtgccatgttagaccaaaaattaattctgaactaaagtttttctgtcacgaccagaattaatcccagtaagagctggaagaagctagtatgacgtttcgctcaattgggtcaattctgttttctctcccttttttgtccaacgagactgtaaaaagtcactacaggagtattctactgcttcctggctgctgcgtcgcttgctgctagtggtgaaaatgcgttggggcgtcacttgctgctagtcgctaggtctgcacttcaaaaaagcacaccaagctagcagcg

SEQ ID NO: 50794 - DNA, 746 bp, Oryza sativa
tctgaccggccttctgtcggcgatctgaccggcctatacacggcggtcagaccggcctaattagaggaaaaccggcagactttcaaactttggcaattttctctattttatttctaggtgttaaatttgggtgtaaacactaacctcactttagtttcaagatgacatgaatcgagcggtcaagtgtaagcaggcaaatccgcaaacatatttataatacaaataagcgggtagtataagtatgtttgttggtctgcctacttgcaccattgagccatgtcacaggctcacagcataagctattatgaatctatgaaacatgagtagattttgttggaaatatagtcattaatcggcatattttaatccaaaaagttaaagcaatgatcatggcataagcagtgtagggtgatcttaacataaccagtagcatactatgcgcatcatgaatgtcaggaacaggaacataccagtaacgcaataacatgctagaggcatcatgtagaacaggaacaagaacatagcgcacatagtatagcgatagcgctaacaatgggaacaagaatagcgctaacaacagtaggcaggaggagaagagtataccccgagaatggccctccgctggatggtgaggcaaaattgcctccgttgttgttgtcgttcacggcacctcctggcgcaccagctccggatccagctcctgtcggcggcgtaccacctccgccagcagtagcggcggcaactcc

SEQ ID NO: 50795 - DNA, 787 bp, Oryza sativa
  unsure (1)..(787): unsure at all n locations
ttggattttggaggagaggaaatggggtgggttggtttggcatgccattccatgaggaggtgggctggggtggattcaaattggatctcagcccactggcaggcttattcacccgtcgtctttttcagctaaaacgcgggtattgggtggcattaagctgtaatcaattgttgttattggcggtctgtcatgaaaatgctctagaagtctagagtctagatgtaaaggcaaggaatgttcatgtggtgaatagcgatgcatctgaggagaaatatctagtgttctactatcatggtgatctcacgctcgtgggcttcgttggcagacaacgtggagagcatatataaaaggcacgcaggataatgctgaaggatacagtgggacaatcttgagttgctactacgtgattgaaacttgcccgaagctttttcagtagcgcgaacatgttcgactggattttccttatggaagagatgttgaactaactgttggtaacttttttttttgacaaattgacaagcacaattatagcacctaacatttgcggtgatcttagagtcgctaattacctcaatctaacaaaagctaaaccaagatgggttttgataactaaaccggctagtgtgagccgattctagaaactggctagcggagccgattctagatactacccgtctcgtgggcaaaacggaaggttttcaggacaaacctacaaagaggtgtcgcactctcgcagcggggcggacgatttacagcgcanatcgaccaagatggacaaactaagaga

SEQ ID NO: 50796 - DNA, 535 bp, Oryza sativa
agaacgtggacgagctgttgcggagggaatcgtgggaacgtgggttagtgcctgcaaaaggatagcgacgtgacgtgacgcacgcacgctgccagccacgccacgccacgcccacgccctcgcccacgggcccggcccggcccagcccggcgcgcgcgcgcgtgtatcattccgacccctacctcaactggtcaacagggagcctccaataactccctatttaggttgagatatttctcgcttaaatcctgaggtggtattattatcctcaacacttattatgggcctttgagatttaatattataagttgggcctagcccaattattctaacaatccccaccaaatttcaaggctcataagaaatgttctcaatgttgtgcctgtttgatataccagggttttggtggagactgttaagttgaacttccacctaggaaatgagctacatcagaccacaactgaacaatggactatgccttgaattgtgagttttgtgtaatcagatttcactcagaaccttgactggtactggg

SEQ ID NO: 50797 - DNA, 1013 bp, Oryza sativa
ttttaagatagagggagcaccttatttgggtagaattttgttaatagagtcatcagcaacaactagaaaagtgctcatgctttgttataggtaaaagacaatacattacaaaatgctatagacaatatatatattttttatcaaatatgcatgttactatcacttcattgcttatttaaatatatatatattcacttgtttgaaataaatactggactattccataatatcataaattatcaatggctcatttataaaaattgcaaaaacaaagggtgagttggtcgtggcatattcaatgttatcatcatcagtggcttctaaagaagtatatactccatccattttatattataagccgtttgattcttttatgaaaattctttaggtttaattaagtttataaaaataattagcaacatccacaccactaaattagttttattaaatttaatactgaatatatttgatacgttgttcgttttgtattgaaatgtattgctattttttttctataaactagcatagtggcccgcgcaaattgcgcggctagcatcattatattttctttcatataatagcatatatattttctcaatgtattattcaaatatattagaatggcaacataatttaaattttgtactaactttacgaaactattaatgtgtaatattcatattgtattttatatgcgtgttagttattaataattttaaatatcaaattttagttatttgtaaattatattcctatatggactctagactcgtctttcaatatttcttttctttaattccgattttttgttttctgtgaattgtatttctatataaactctagactcttctttcaatattatttatttttaattctgaatttttattattctaattgtatttttatgtgaactctaaactcatctttcaatattctttaatttttaatttcgaatttcagttacttctaaattatattcttatattgactttagactcttcttcccatgtttt

SEQ ID NO: 50798 - DNA, 640 bp, Oryza sativa
aaatcatatattactaggctcgttggaagctcgagcttcgcgagcttaggaagaggctcgggctcggctcgtctggagctcgagccgagctcgagcagctcgcgagcctcgagattttttgacagccctatccacaaccactatagtatgctttgctccactgctaccctaacagccactgaagcgttacattctgtcgctgctctaatacgattcaacagcggtagggatcgatttatgaacgcactatagcgaagatgctaaaatacaaaattgtcgccactgtggacaaccacgccaacgcatgagctgcggcatttgtactttggacctcgacttatgtaaagtatggatttcatatgacataggaaacttttatggtatcatagagactttggaaaagatgtacaaatttgtcctgatatcaagtatgttaaacctgcacggtgacatctaagaacctataattaaagagcaattttacggtccttaaggaggtaacatgaggtaccattttttctattgtaaatttagtacctcttggtaccttggtactaggtacctaggtaccaaaggtactaaaatttggtacctcatggtacctgctcaagaaccgtagaattgctcataattaaaaccg

SEQ ID NO: 50799 - DNA, 744 bp, Oryza sativa
tgcttaaaggtcccggttttatgtgttttcagctcgcagagaaggaaaagcactataggtgtcagttttactgttccggcacctatagtatctatagtatctatctctacgtgcttttttaagtagtgtatgcatcgacagtagccatcttgccatctcacctatcaaacattagttgtccagagtctagacgctagatgttatttttttcactactctcatccaaaacatgcaaatacgtattcagtactctaaatgagttcaaatgaagaaaaaaattatcaactaaaaaaatgtagatctcgtcaaactatataattttcatataaggtttgtctccattcataatctttacatattataaaagtttaagatgtttttgccagatgtttcgtgcgtcatctgacttcgattcctgctcggcttgcgcactatcgcccactcgtgcgcatcagaatcgggtccgtgttagtgtccgacttctcccctatacctgcgcatgttcacatcctctctcacgagttgttcgcacgcaccagccggaaaaaaagagcggagcatcgatatgtcagcaaatcgatccgactctaatccaaaccgatacgtcacacaaataataaaatcagcatgagagatatatatagacttatgctgtgttcggcagcccctcttcctaacccatctcccttattttctacacgcacgcttttcaaactgctaaacggtgtttttttttaaaagttt

SEQ ID NO: 50800 - DNA, 2066 bp, Oryza sativa
gatgtgaaaacagaaggtggcttggaattggtaggtgaacttcatcatccatagtcacaaaatgtgccaagaaaactctcctcctatggtttaactgtgcaagttggagaaaagtgccaaaagcacttcaacaactcaagaactaggtgaccttgttccataaaagcttaccgatttagcaaaatcttatgtgagcaagaacaaaactaaagcaaattcatgtaacccctagattattgattagtgatttaatagtcaaaagatcatgtaagtaccaaattcccatgatggccagaagcatgaacatatggacaactatcaccactaaatagcaaaacctcacaagatcgcaattaggacaaaacttcctgcataagtgtttggtgtccaaatgggagaaataacatcagtatatgagagcaggttattcaagaaagtgaacacaagagagttgaaaagtacccaaactcctgaactacgaagcgcatcaagaactcatattgacgaggggaaggctagaattgatggattgtcctcgcaagagaagaagccttctttgccttttccctacacttttcagtccatctcctctccaccaatcttttcttaatgtttgcttgccttctctattattttattttggatatctcagaggtaaggcaactataaaaatagagggaggaaagcattggaaagtgatgttattggaggagtagagaggatagaaagggagagaatcctagttctttgtgactattcatggcatttctttctacacagtgatttaatgttgagattcttttgctattcatttcaaccagcagcatttggcaaggtgggattcagctagtattctagcaacttgacagaattattatcttagaatatgatcccttttgaagcacgcgactattaatgggaatatttcattggacaagaatacagcaggtccaatgacaatttggaagccatgtgcattttcttttcctcctctaattccttgctatcaactgctaacaaggacttaaagaatttgccaatcaattcgttgttaattgaagattttacactgaaggtctcactaacatctgagaagggatacatgcaagtgaggcatgggctagaattctaaaatggcaacaaatgaagtggcaaattctcaaattgactattgattggttatgtgaactatgttagctaattttagttcacatttatacactagacttttatgaatctcgtgatcctaatggctctcctgtgttacttacagagttatagcccgcatggttccatgtaataatataacaaaatacagctaaaatgaaagtgacatgtgacaataacagccagtgggagtgcggcatgctggcacagtaatgcccacggcccaagaacccaaacatagattatatgcagtttggattaggatagagcaataattgaccactttattgtatgtcgtcaacagaagaagtgctgttgaattatcgacatttcacatcatgcggcattagcattagccaaagcgctaggaacacatgagattacttgtaggttctgatattattcctcaacaacatgcaagcaatcacaattcacaatagatgtaacaatatcgaatatataaaaagaatacccatttttttcccaactagtatccaagaaaagctaccaacttctgaatgggacaattgctatgcttctgccaagtgcttttttgtaaaggcgatttcactcgaatttcttactgtgctataggctcgatttcgtcgtgtgttcttctccgtctccgatgacttcttcctccaccgcgaggcttgtcgatccaggcgagcggtgcaccaccggcgcatcgcgcgtcctcatccagcgaagccggcttgccagcgcagccaacgaacaccacacaaccgaagcttgccccctactccggaacgcccccacttgctccaccatagccttttagcctctcttgtttttcgcctttggtagcctttgtttcgcgcctgtcgccattgatcttcgctgccgccaacggaggcgccttaggcagcgagcgaggg

SEQ ID NO: 50801 - DNA, 913 bp, Oryza sativa
aaaaaataacactcttttaccaaaataacatgcaagcacaatataatctagaaaactatccattttcttcttatttttattagatcaattttaagttgcgttgtttgagacaaaatttatttcaacatgcccgtcgcgtgcgggaggacgctaggtggcgtggcgcgccccggcaccgcacagtcaacaataccatgagagtcgttattagggcaagttttatatagaggtggtagtcatctccaattttatccacatcatccatccataaaattaaaactaacttatataaatgcattgcatttaatacactagtcccaatacacttgtcaccaataaacccctctcattttctcttgttcttgaaattcgtatggaggttgctccttgcatgaggggtgagtcctcctcctcctcctcctctctctctctcctccaaatcatcatttaagcatacatgacactttagagtttgtgcttagaactttatagtacttgcctttagggacgtcacactggcttggccttctgccgccgtcggacttttcactgggccgtacttcagtcgagatttcgaatgtagctgtatttgttgtatatcagttgtgttcttttggaggggttgggaacctctcccctccgcaagcaaaacgaagcgatagattaacacatgattaattaagtattagctatgattaattaagatgagttatgaactatgggagacaacatatcccgtagaagagaacctttgcctcctcgacgtggactagtctgcttgctctaaagctaaagctttttgggagcgtagttacaagtagtctatagtactacagtctctcttccaaaaagtttcattaggattttattcctataatatcctatcgattgaaagaatggaacttttaaaatc

SEQ ID NO: 50802 - DNA, 757 bp, Oryza sativa
tcagaaaaaaaaatgaacctagataacgttatattcagatttataggtaagaattaatttttttttgaataaagtgtggactgaggtagttttagagtagatattacgaggttgtctgatttgagtcatgctgtcatgcatgtgtgtgtgccgttaccatatatatatatacttcatgcatgtgagacgttgacgataggtcattagcacgcttgacagtggagaacgcaggaatttcataatgagtgtataaagtaaatcaagcaagatcctcgttcaaaaataaagctaatcaagaaaccattggttaatttaaaagttgaggcctatgagcaaacactaaaacagaggcagttccacatgtgatttggttgggttgaaactggtgtttctggtggagggaaccacacaattatttagatctaaccatagtataaatacatgatacatactggaattttttgttaaagtatttaggtgtacagatgtagacccatgacaactaggtccgccgcccctgacgctcttgacaaataggattgcttcacgaatgatcattcatgtgaggcttatatagcacaggcattgctgcaccgtgtagcaactaacgatctgattagcacgtcgttgtcgaaatgtcccaattaattttgctatcgccgctgtctttccttggactcaacaaccaatttaaggaaatcttcagacatggtggacatcatcaaggattaatatggcaagtgtcgtatgtcacgtt

SEQ ID NO: 50803 - DNA, 811 bp, Oryza sativa
tatatatgtgttttaaattacttttatcgtatatgtaaactacttttctatttgactaaaatactttttagacatttatgaaagaaaattcgataatacctaaaagtaaattatataaataattaaagtaacttagcacaaaatataagtaagttgtcacgacattataagtaaatccgttttaggggtgaaaacatgagtccacctagaaactaaattaaatcagcacaaattatggaactgactaaacacggtaataaaagtaaacagatcaaaacattatgaatgtataagaagtaatttaatcaaatctaaaacatatatatatatatatatatatatatataggacactcatatggggcaccatggtgcccgggcaccatgatatcaaatacacaaaatcactcaaatttttcaaaattttcaaattgtgagtatatacctagttataataactcgattcatacctatacctatcaacaaaacaactcaaatttaactttatttcacaatccatgattacatacctaactaattatatgcatggatgctatatacctagaatcaaaatctaacaaaaacaagttcaaattcagttcaaacttgctttgaactagttagtaaagtagctaatgttaatatctaagtaattgaaaaagtttcatactcatttgaattaggtatatactcaatttcaacaatggtgcccgggcaccatggagcaccaaacaaatttactatatatatatacatatatatatatatatatatatatatatatatatatatatatatatatatatatatac

SEQ ID NO: 50804 - DNA, 716 bp, Oryza sativa
taactaaataacacttggttttaaggtcgtaacaaattccctttttaatcgatatatgtacgtgcccgatccatttttttgttctctccatttgctgcttgctgcctgccggttgctctttgcttgctgctgccctgcctcctactgcctgtcattccctgtctgcgctccttgcccctgactgcttccgtcgcccggatgccctgcaatgctgctgccgcttcctgcactgctgctgccgcgcctgtagcagttgcgcccgggtgccctgaagccacgacccttgactgctccgcatccccttgccgctgcgcgcctctggccgagccaccagtggccggcgcccttctgcggctccgccccttcccacgcacagagacgtcaatcgtggagttggggaatttccaaagacctaggttttgggtgcgcgggaagggcagatggaggaaaggaggtcggaaaatcgaatcaaatcacattcgcggtggctatcagcggcggcggtagcgcatgggacgaaggaaagcgaacggaattctctcgggccggatctgaccgaataagagaacgcgaaaatacaaaaaatactccatgcaaaaagatagaaagacaaatttacccttttcaatttatactgtaaactaatctaaaggaaggtcggatgaatcgacaccgttacatcatttactaatctaaaaggaagatcggatgaatct

SEQ ID NO: 50805 - DNA, 884 bp, Oryza sativa
gccgaggaaaaacgatatccttgatagaagctgattaccaagatggtggcccttgttaggcaggctaattgaaaaatggagctctggcttcctggagacctggacggagtacttttctcaggacaaggaaatgctagctgaaggcctgcctgaagctgcactacagacttttccttacgatcactgtatttcccgttcgattttcgagtaacctaactgtttgagttgtacgtcagtacgtgttacggtaccgcaagcgactttctggtttgtaacatttctatgcatgaacctacttatgctaggatttcaattgtcaaccgagtatcgcggcttcatcttacgcggtagagcctgttgcatccataccatataggagtacagttggttgcattctctttttgtcaggcacacatgatcacatcagagtaccatatatttctttccagaatatagtactcatgttgaatcagtatattctgttttcagtcactttattgatcaaaatttagattttagatgcttatattccttttccaagcacctaattagctgaaaatatatggatttatgtgcattggaattagtacaaagtttaaatatatccttaagatgcttataccattttggagtgttgggactagtattttgatatcttccgttgagaaaagtacagatctgtctggtgtatgaaataatgcctcgccttcgagtccacaattctgatggggacatcagactactagcacaagatgggccgctcttaagtgctaaggtatggcgtgtagtgaagtagatcagctaaaaaatggttggccatccgattctagcatgggcattagcagaacagcaggccaggaaagcatgtcagggatgcaggaatt

SEQ ID NO: 50806 - DNA, 738 bp, Oryza sativa
ttgaactttgcttgtagatcatactcaacctaaagtacacaccattataaactatatacttattgtgtcaggaaaagaaaaggacttcagaagaatttttagaagctcccaagaaaacagaatttataaagaaaggataagcattaagaaaggaagctatttgagcataatgggtaagattcaaactgaacaacagaagttatagtatgatgatctaaccaaggggtgtcatcattaagaaattggatccatttggaacccgggaaatggaaaggaaatgcgagtgcagacctggtttggaaacacaaatactcaatgaaatagcaggaacagggagaaaacgtaattaacagatgacgattccaagagcaggcagtcagccttcttatccatatccatgtgctcttcggcattgcgccctggttccaatcaaataggggaagttttgcacttttgctctcttatcatcgagtgcacgcggggagagattgcggcagcacggaagaagccaaacgtggtcgcggctggtggtggaaatgacgccgacggcgaacgtccgaccgggcccccaaccccgagcaagacggaattcagcgatggacgactccggcgtcgagcgagaggatcggcagggaacgtcccccgcgacgggaccttcgtgccaccgacggctcagcgacagctgaacgcggaacctctagctcgccctcgcccgtaggaaagtttcaaaatcaagct

SEQ ID NO: 50807 - DNA, 582 bp, Oryza sativa
ggggttcagttgaaccccaaacacttgttaggaatcatcaacctgttactattattaaggttaaggctaatttctagaacagaagatagggttaacgcaaattcgagaaaaaaagtgcgtgggtagagagagagagatgggaaagaggatgtaccgatgcggcggaagcagcaggatgagcgacggcgaccctcgctcgctcgcgcgatggatggggatcggagcaggcggcggtggcggaggatgtgctcaccaggatgcggcggaagcggcaggacgagcgacgaagccgtactcgctcgcgcgatgaatggggatcggagcaggcagcggtggcggaggatgtgctcaccaggatgcggcggaagcggcaggacgagcgacgaagccgcaatcgctcgcgggatgggagaaaattgacattttgccattgtcaaaacggggtttcgctcgaatgccactcccaaaagtggtttcgttaaaataccatcctcaaacaggggcaacatgttgtaatgccattttatccatttcttctcaatttaatgatttttgtagtgttttttttgctgagatgactaa

SEQ ID NO: 50808 - DNA, 1494 bp, Oryza sativa
cccggcaagctcgccacgtatacgcgtactgcccagattcccccaatccagtccccccaccaaacccaagcccggaaaccctctcccgcccgacacgtgctccccccgccaacccgtggtgcacgcttccgagcggatatttccgcccccgcctcggctgcacgtgtcggtctcctcgcccggcacctggcgcaccgtgaaaagcccagaatccggcacaaaaccgcggataaaaaaatttgtcgccgcagcagcacgcgcgggcggggccggcacgacgggggaggagacggatgcgcgacgcgcgtcgcccccgaaccgcccgactcgcgcgcggcgagcgacacgcggccggctgcgcgggcgccgtcccgaggcgggtgggggcgcgcgggcgcgggcgtttttttccctctccgggattcggcactgacacgtgtgtacctccgccgagtcggtctccccgcccatgaaaatggcctgtttcccggctcgtctaccgtctccccgctcttggggcgcctcacgagtcaagccggcagcacagcacgcccagctgctgtcgattaggaaaggtggcgatggagttaagtaatgtgacgtctgacagcggaggctcgtgtaaacaatgcgtgcgatgcttgattgatgcgtgggacgacatggacacccagaaatagagaagcaaatgcgtgtagaaatggcaactgccgggtcgtgtgacccggattttgtcaggtcgtgacgaacagtacccagattgggtatggattaggtggtatgattgagatgccacactgccttactagtgctgatgagatacatccttacgtttaatgaaagagctaatacttgattttgttgaagcaaggagattagagacgggggatatttggacgcagaaaaagttgctgctcgatgggttatgactttagctttggtcgtatctacgatccatctagcccgaggatggatatagggatcttgaagctcgagtggtccatttgtcaagcgcgcgaccgtgacacggctgcctgggcggtccgccctgccgcgacaccacgcctttcggggagcacgagaagcccccgccacggctgtatatataccgcccctcctggcgtctccgcctccgccgcgttgcgagctgcacattccgctgcttgcttggcctacgtgcgtgcgaaccgacccaagtacccaaccccaagatacctgtgcgcgcggcgctgtggcgtgacgctcgcgagggtgtgaagcgatgagcggaggcacgcggaacacgcgccagttcttcgaatcgtcgagcagcggcggcggcggcagaactagcattgacgaagggaggggcgtccgggatggtggtggcggtcgcgttgcggcggcgcggggcagcggcgtgaacacggggatcctggacgagcacgtgctgtccctggtgttccggtcgatcaactgggacccgcaggcggtgtgcacggcggcgtgcgtgag

SEQ ID NO: 50809 - DNA, 715 bp, Oryza sativa
cagcaattctctaccaatcaacagctttccaaatagagtgaaactcaacatccatacctattttttagcagctccggtgagtactctcgcgtgtgagcatactcctggtcgctcagcatgtagtaggtttgtctctcccgatcactgacaagttcgaggtcggtgtcgtttaggagtcgcctcagagcttcggcatcttccatcgagacatctgctgatgaacgagtactagactcgtcatgatgacttgatgaagagccggaccccttgaacagacgagacagtcgcctcctcattctgcacaatggaacaagaacggactaactcggcgggggttaattaggaatgacaagaatttcacccgccggttagtttcacccaagcaacttgtatatatgcaactaagtatttgaatttgagggaaaccatcaaagcttgattgaacttgagagcaaactttggagagggaatgaaaatgtgtttaaacagggtggagttccctctcccggccggttggcttaagaagtgcacccacaacgatcaaaactgacctgtggggcccactaaccattgcctcaaaaagagaggcagccgaccgttggcctggccagtcactggttcggccgaacccctggtgggcccaaccggccccacttttggccgttggattccaacggtcagtgtggtcgtggcacagcaaatttacattgaaaat

SEQ ID NO: 50810 - DNA, 693 bp, Oryza sativa
ttgtgttattggttaggatctgccataatcttctctaaaagcggtatccttggaatatctttgcatgcattcacgggtgcaccgttggatcaagcagagatatttagatgtggtgtttctttaccggatgttttgttatacctattatgagtaaattggttcccggctcggaataaatcccagtctctcattactctatcataaatttgttactatactcctcattcccggtccggattgaatccgcgcgtaaccgaacaaggccttactggggatacaatggaaatatcttggcatctttgtttctctgtcaattcaaaccaccgtcttcaattcgtttcaaatcttttgaagtgtggtcgatctctcatggtcaagtagaaccgacgggacctaatgtttggttgtagtacaatgcactccttaattatggatggtaacttttgatccacaagaactgtttctagcttgccctttccaatttcaaaatgagtgttcctttcatgaaaagggtaatgtaatcatatgcgcatatatgcacctttgcagcgatagttagtaagaaatctttcatcaaaatgccgttaattaactagtgaatctgtggaaagatgaaatggtaatgtagtagtacaagctaggttgagtagtttctttgcttgttacctacgtgtatggcgtgtgtattgatcg

SEQ ID NO: 50811 - DNA, 666 bp, Oryza sativa
cagttacccactcccgcttgtggtaagcacggtaagtttcccagggtttcccgtgaaccggtctttaattgcaatgggtgcgaccagcaaaaccatgcaaccccaacccaccattcaatgtattttaattaactaacaccattgcggtggcaccaatctaaaggtatgccaatagacaaagtctatgtaataatgtgatccctttttgtgtgctagttgagctaagcatggctaagcatttcctaggccaacatctagtcattttgatccccaagttatcaatggcataaggtaaccaatatgtggctgaggaataggacccatcccacattacattgtaaaacaatgcaatatttaatagaaatgcgggacatttgtaaattgggtacaatatgatcaattgcaatgtatgacttgccttgctctcgcactgatgagatcacagcaacgtcttcgagaaactgcggatcgacgaaacggccgaaacctacgcgacaaacaaagcacacaagcaaaacatgtataagactacagaaacaggaaacaaaaccatttttaatggattctttgcatttttcttgatttactgagacttgaatggacttaaacggagctcggatgaattacttatgaattttagaagataaactgtgtttatttctataa

SEQ ID NO: 50812 - DNA, 1620 bp, Oryza sativa
gaatatattaattaacacgcatacataacaccctatcagtaaccagctagtattcatataatgtaatttgtatccccagagtatttgcttttcatgttcctcttaaaaaaatgattgggccgtgttgctattacaatttcagtaagcttccatttctctctttcagcacaagttaattaccaattgcagtgaaggtttgatgaagtgactacttaatttgcctgggtggccaagatgcaaaacaacagttggtactcacagcattcactgccatgatataggaggataggacagaggatgcatgcacacacatcatcatctggtaaaggggcatgcagcatttgtgtgtgcaatagagatcccaatgctgatatacacatttgacgattggattctagtagtagtgggaggaagaaacacaagctttggttttgcatatctgtctcatgcaggcagtgcaccccagctgaatctttgggagcatctctgtcatctttttgtgtgtgtgatgtgcatgtttctgctctctctctctctctctctctctctctctctctctctctctctctctctctctctctctctctcttaaatgccaatgcatctatgcatatgctttgtaccacattcatatatatggatttattgcattgatgtgttgtgttgtactactgatgaggcaagcatcatgagatcatgctgaaggatgagcatttgggcatcaatgctgcccccctgtgtgcatgtttacccatgcacggttcctacagggcatcacatgaatacatgatcaaaccatctttattacagattttttttataagatgctcacctaagagtatggccaagaatgcttaaaaatctcccccccccccctaaatctccttttgaattctgtaacgatgatttaaggattaaaaaatatacttctttcccatatatagcctaaatttgactctctaagataaaaaaatgtggccacctataaatcccgcgcacgatttgcctccctcagcgctagtcttgctcgctctttctctcaagcgataccacacagattgcagattggaaatgagtgcgagtcaacttgtgtagagcgacttggacgagctggaagggattttcaatttttggacaggtggttaggctgttggacccatgttttcaactaaaatcacctaattttgggattgagaggagttttggagaattgttggccatgctctaacaattccaatggaacttcgatcgatatcagctcgcctttcaaataaaacctctaccattagttatctttctttacatttaggttgaagtggtgcattatttggacagattatttaatttgacctttaggctgctagaatttagataaactgcattccactaattatattaattgatatatacaaattctcgctcagaaaagttggtgattttatgtggcattttgcattatcatgtgtgtgttttttaggtgtagctagcctagctacatatatttcagtttgctgtattttcttaattaacctaaattatcttccttctaaaaaagattatcgtgatgtcgatcacgtctttgtccaacgaaaattaaccatcagactctggtgacctgaa

SEQ ID NO: 50813 - DNA, 1468 bp, Oryza sativa
tgataaaggaaccaaaaaattcatttttgtaggagcatccgctatatgttgggctctatggttcagtagaaatgatatggtttttgataaatctccgtatgtatcttatatgcaggtccttttcaggataacatactggctccggttttaggctcaattacaaaggtgttatgaggacatcaagctaataaaatctgcatgtcgactacttgagacaacggtcatgcagctttttgccaactttggttggaggttcaccaataggattcaataatcaatgggtctttgttttacgtggttatttgttagcttgtgtttcctttaccttactagtgtgtgttttttaagacttttttgtgtgctggtttgtgtgaatttgtgtagtaattgactgtaacttcttgagcaaaggctgagattttattccattattgaagaaagaattaaaattggagcgcgtggaattaacacaaaacgcatggagaggaacatgaaaaacgctattacagaagtgatattttgcttttttttttaaaaaaaaagggacggaggagaaagcgaacaaggagaatcacttgcacgttgggggtctgagagaggggtccctgacttggcagatcctccagcgatcccgttgcagccttgcccactattctatccactatcgccctcctctcctctgctctctgccctctgctgctgcaagaagctaccaatccaatcctatcattgcaacatcctcaacatcctcacacacaagcacacagctcatccctctctctctctctctctctctctctcacgggcataaatcacatccgattggcacatcaatgcatgccaatttgatgagcatgagcatttgctgctaaaaaaatgtactcctattttttaaaggaaaacaaacacagtaggggaaatgtaaccccacagtaaagataattgcaaaaaaaaagtattaatcccgtatttataaatatattggtttgatgattcatgaatcgccgaaggatgtcacacatttataaaatttaattggagccttggtaggcttcagagagaaagcaggtatagacccctcgctacgaaaccatttttcacctcatcttttattaagtacatgaaggaaggatttagagtactagtctaatgaagggtcttgctcatgaaagcagcaccacattcatcattcctttagatgactggtgaaaaatcaggccatgtttagttactacgaaaaacttttcactctgtcacattaaatatttggatacatgcatagaatattaaatatagacaaaaaaactaattacacatattgcttataaattacaagatgaatttttaagtctaattactccatgatttgataatgtagtgctacagtaaacatttgctaatgacagattaattatacttaataaatttatctcgcagtttacatgcgaaatctgtagtttgttttgtt

SEQ ID NO: 50814 - DNA, 1146 bp, Oryza sativa
catctggtggcatgaacttgaagtgagtcaataataataataataataataataataataataatcaacaaaggtggaaagaaaaatccatgagtaacctttcttttatagagtgtgtttagttcacgccaaaattagaagttcgttgaaaatgaaacgatgtgacaaaaaaattgaaagtttatgtgtgtagaaaagttttaatgtgatgaaaaagttgaaagtttgaagaaaaagtttgtaaataaactcggcctctataagaaatcataagtaaagcaaggatttgacacgtcgaggagcgcacattcgtgcacatcgccaaggtatccccgagaaaatctgaatcgtgacaaaggaaaacgcaaagaaaaagaaagcaaagtcagcgatagcaagacaagcgtcccagcgagaccagcggggtggcgtcatctcattctaagggcctatttgtaaaacttctgccagtggaagattcttctattagttacaactgccactaataaataatttaaaatttcaccaaaattctaagaaattataattataaaatccagaaaataaactaagaactgaaaactaagtttaccagcttctctaaattcttatgagtatctaagagcctgttgggggagcttctagctgctgcaacttcttccagaagtagaagctccccaaaaccgttcagcttttggtccaaattttaagaagctgtagttgtataattcagaaaataatttaaaagccagaagctgaaaaacctattttttaaaatttttaaaaactagttattaaattagttgtttctcagtattttaagctcccaaccagtaccttcgtttcttacaccgcatatcccgtaagttaagtcaccaacgacccaccaccagccgaggtcaacagtcatcctgacacctgggccccacctgccagcgaccccacacctcccccccaacatcgcatcggcacctgccgccggtgcgctgttctcatcaaccgcctcgtcgaaagcaacaacaaaagcctccctctctctctctctctctcttgcggcttcagcgcggccagccgagagggaagaagaatttggtactctttgccctcgatcgaagctaccacccatcccaccttgcccttccttcg

SEQ ID NO: 50815 - DNA, 1774 bp, Oryza sativa
caaaaatcgccgaagtaaacataaatgtaacgagcatttccccaaatggcgctctcttctgcagcaataacaaaggatttcccctacaaaatccagcaagcagtttcacccgaagcaattcgcaagcaaagtctataacccggagaacctaaactgaccccaagaaccaacgaatccccaactaaattcgccaagaacccagcagcaatggacaggaccacgcacccagatcaggagctcccgagattcagagctcgagcggaggccgaatcggggtgaacagcgagtgattcccgcggattgggagatctccaccacctcctctttgctgggaggaggagagatttccgatgggcttaggtttctttccttcctttttcgtgtcttccagctttggattcgtcagttattttgggttcaggacaagtgaagagccaacacccgtgtgagtcagtcagattgggggttggacacgtggcgtcatctgcttggcctggagttactttggacggtgtatgattgcatcagagatgagccaaaggcctttatttggacagagattcccaaaaacagatggtaagcagagtcagtgagaatttgttttttttaacaaaaaaagaaaaaaaaagatgaaagaacctagattgtccgcagagctcgatatttcagagcctcatcagttggcctaataagccaaaatttgaattttttaattcgattttaaatttgattttaagatatttttaacataatccttttagagttggctttcaagtcgctacgaacaaatatataaaagttttacctacaaaataatttttattctctaaaacttttttggcttattagaaaatatgagtaaccgtaaggctctgaaagaagctttactgctaaagcttctccaaacacggccatgtttgcggacctgattcatgtagaaaattggctcaagcctgactttgccacccacgtttgttatgaaaatagatgcacaacggagacacgaatttaacgtgaaaaacccttgcggaaaaaaaccacaggcgccgaccggcaatgatcactatagagaaatgggatacaaacgcaagggatatattgggctgtcgcaccctccccgtgcggcttacaagggatatactaataggaaactaatcctataaagtagagtcttattagataactaatccgaatatactgtaggcccaaaattcggatcacatatttaacaacgtttttgccgtaaactcgtgccaaaaccacgacataaaactgaatatcacacttgtgatcttgtactatttaaagctatgattgtgccgttaaaccaaacaactgtagttacaataagcaaaatcacgtacaattcaaccaagttgagaaagttcagcatggattttgccattttggacaccacagtccaggaagaccatcacccaggctacaacaatttcagtaacacaaaggctacaccaaaatccagtaacatacatcgggataaaagccaacattttagttgcgcattcatagttggtgcagacgctaagagtgttaatttttgttacgaaaaataattttaaaaaaaggaggaagatcacactgatgtagccagaagtctctactggttgagagcaatccactccagctccaggtccacctatccgcactccacattctgcagcctcagggagacctcctgcttcaccctgccgtcgacgacgctcaccgggctgtccctggcgagcgcattgtcgcgcgacatgagccaccggcc

SEQ ID NO: 50816 - DNA, 1738 bp, Oryza sativa
tgatcaattgccggatcaagcagggaagctatccgtgacagaggaggaagttcagaagaatgcagtggttgcagcaaggaggcaacaagatcaatatgtggcagatacttgtgatggtaccgggaaacctccggcttatgagatgattcctgctatcaaggatctatacaagcaaccatcctttggggatgtatcttctgaggagattagtgaagggaatcaaaaaagatcttcggctcagatagagccctagaagctgggaagagttcaacaagctttgctagaatatcaacaaacagagttctagcttggtgtaggtggattcaaggaagtcgcctagagccctgaagagatttcataagacataggtaggaatgggatcggaagctatggaggcaaccggcccaggggccgctggtcaattgacaggacctaagaaggggtcccgtcaggagcaatgagttgtctagcttggaactatcacggtatcgggaacgccatgacagttagtgatctttgtgccttagtgaaagaggcaggttcccaaattgtattcttaagtgaaactagacaaaaggaagaaagagttcgtcgtttgcgtaatagattggggttgagaggttttgtgggggttagtagtgatggcctcggtgggggccttgcattgttttggcatgaatctgttaagatggaaattataggtatgaatgaaagatatatcgatgtgcatgggcgtttgtctttggatgatcctatttggagggtgaccttgtttatggggaacctagagtggaaaatagacaccacatgcggtcattgttaagttctctgaaacaagtgtccaatctcccatggatggtggtgggtgattttaatgaagctctttggcaatttgagcacttttctctgaaaccaaggaatgaatctcagatgcaatccttccaagatgtgctacaaactcgtgatctgcatgatttgggtttttcaagggtgccatacacctgtgataacagaagagaggggagaaacaatgtaagggtacgccctaacagggctttagctgatgaaggatggaggaaaatttttagtaatgctcaagtcctacatctgacatcatccagatcggaccattgcccaatcttggtcaatttatgtcctgaatctattcgccaagagcgcactaagtgcgtgcattatgaaatatactaggagagagaactggctatatcggaaattattaaggactcatgggaaagtgctggagataagagtaccctgggaggcattaagtctgctttgagcaaagtaatgacttctctttgtacctggagcaaaaggaaattcaagaatgtgtcatggaaaatagaaaagatcaggaagaaactcgccttgttgcaggaaagaaatgcagataatatagagatccgtcagacaatggaccaaatgaacacttctgtatcgagaagagatgatgtggttacaacggtctcgcatctcatggctgaaggaaggtgatagaaataccccttttttccacagcaaggctgtttggagagcaaagaaaaataaaattatgaagctccgggatagggagggtactattcatactacgacaaaggagttagaacggatgtcaatagagtatttcaaggagatgtttacagctgaccccaacactgaccactcaaaggttacaaacctaattacagagaaggtgacggtggcaatgaatgaagat

SEQ ID NO: 50817 - DNA, 2796 bp, Oryza sativa
cgatttttaaaaacatgtggtttttgggtcatgtgcacatagaataaaatagaatggattttcgttcggaattcattgtccagaccgggtcgaaaaaaaatgcttgggttttcgatcatgcacacatagattaaaccataaatactattttaagacaaaattgattacgtctggaatcagtcaagtctgtccggaccggttcgatttaaaaacacatgatttttcagtcgtgcacacatagaataaagcagaacggattttttttatgacaaaaacatattaaggactgtccggaccgggtcgccactaaaaaagcgtgttttttcagtcatgtatgtatgtatgtatagattaagccagaaatattattttaggacaaaattggttatgcccgaaatacgtccgatctgtccggaccgggttgatttaaaaaacacgtggtttttggtcatgcgcaaatagaataaagcagaatgaattctttgacaaaaaaaaaacatgttatgtgcggaattcatctgggattgtttggtgggttctttatgaagttataattagttatttactccctctgtagaaaaaaccaaactagataaagatgagacataatctagctatgacaatatatcatatctcatctttatttaggtttggctttttatttggaatagaggaagtatgagagggtaggaatgaaaaaaaaatgaccgaacccaaaaaaaaaaccaacgacgagaattattaacaagtaggaaaacctaactcaatccctttttccactccaccccgctccataaccatcctacactctaaggactacgcgggtctacctgcattcgatcgtatctctctcgccacacctagtcacgtgctcctcgcaccgcctcctcactaggatcttggcagcgtaaaatggtggcacctccacagctccactccgatggtaatgatggaggtcaaactagagcaattccctcgatttctaaataagctttacaacggataaaaaattataatattttctaaaataaataaattatatttttatggcatatgttatcaacattcattttatatgtggctattcatttagatttagttgttatgtaatattaaaaatttaagggacaatatataaaaattacaacgagagtagatggatggcagattcaatgcaattggcattgaagtctttttaaaggaatatatattgtcattattgattaacaccattttaactgatgaacaaaaacctttttaaaggagtatatattatcattattgattaacaccattttaactgaattaattagtaatagcttttgaataattagattacgatgaacaaaagcttaacgctcatgcttagggtgtgacacacttcgatgattcggtattttttgcagtactataaatattttgagaaaaggaaaaatgagtggtcgaattttaaagtaaataatattagtaacaagtactcaggtgtatctttggtgatggtacatttgattcatggtgttgagtctactaatattggacatgctctcttatttgtttcaagagcacagagtacaatgctgccttctcatgtgcacatgatcccgtgtaggaacccacactactactagtagagaaaccatctttcccgggtcagccaaaatctacaatagccccggttcattaaaaaaccgaaactaaaaatcatctttagccctggttgaaaagcccatagccattttatgcaccaaccgagactaaggctatgtttagttccacgccaaaattaaaagtttgaagaaattggaacgatgtgacggaaaagttagaagtttgtgtgtaggaaagttcaatgtgatggaaaagttggaagtttgaagaaaaaagttggaatataaacgggtcctaaagatcatttttagtcccggttaaaaaagtgtccgcccctagtctttttattcctggttggaaacaccaaccgggactaaaaatcgacgtatagtatataatcccttacacttatcctctagcaaccacctcttcctcttcctttcctctctattcaatcttatcccctcaagagcaagtagattggacgcgtgagcgagtgagtagggtggcaaagggaggcgcggcggcggtcggatggagcggagggccgggcggcagcctgcgcggtggcgggcggccagcgcggagggccgcacgacggacgtcgcctctgccggaggggaggcgggaggcgattgcggcatcgccgaattgtttttggttgtttttacatcttttttagtatttataaatatttacgacatcttgtttagtatttataaatacttttgggaaaaggagaaaaaaatgagtggtcaaattttaagataaatcgacaaatatattggagcggagggcttatattatacctttggtgatggtgcattgtttcatgcatgttgaggacactagtattgtacatgttctctttaattgtttcaagagcatagagtaatctaatactggtttatcatgttcacatgtaccagtatacgaacccaacaccctaatagaagaatcctacttattaagaatatcatcatttgttttatgagactatacctccttcaagtagtatatttttttcctccagattctggaagttagcccgttgaattcagcaaccaactactagctagatggtgaagaaaccttcgaatatacagctatatagttttcttattggcttatcagctacagcgagatttaaattctaaaaaacttaattttaaagttgatttgaaggtt

SEQ ID NO: 50818 - DNA, 1990 bp, Oryza sativa
aggtgctcacgcatacgtacttaaacatagcttaacaatcatgtttgtttcctgtagcataggaaactaaacttttttcgaatatgaggcataggaaacgaaacttgacaagtagctagtaggaaggaaagaaaaaaggttaatttgaacagtattagtaagctctaatatactctctccgtttctaaatattttacaccattactttttaagcacatgttaaaaaaaactttttgtgaaatatgtaaaactatatgtatacatataagtatatttaacaatgaattaaataatagaaaaagaattaataattacttaaatttcttaaataagacgaatgatcaaatatatttaaaatagttaatggcgacaaatatttagaaatggagggattatttatttttttaaacaagctctaatatatccacgccaagatatctcgtgtctgggtcaacttaattaattaagacgtgtcatctaactgcaaattaaatggtacgtgtgaccccatcctgacctactctaaatctctaatctttttctatctagctcaaacttgcgcaatccagtacgtcacatgatctgacataagcattgtacatttgtactagtaccgtaattttcctctagatcaaattgatgtcactaaaattactccagtgatatttttgtaaaatcgatgccccaccaacggtttacttacctcgtaagaaatcgcacgctcctcattcctaattaaagaaaattaatcagatatacgccttccatcgttcgacctaagctgataaaattagcaagaggcatttacattcactaaaaaatagtactactagatatgtattccgctcactatacttaaaaaaaatgattttcaactgatcagagctccatgtgtacatgcaggtggcccgtatgaaatagattattagacatattatatgtgattgtctataagggtaaattaaattaaataatgtttataaagctaaaaatatactgaagtcatctgaataatattataaataccatagaaagtttttgaaagcgtgatggctaaaacttgatcaaactattttgattattaaaggagcgttcgagagaagaggagtgtacaagattgagacgtacgtaaaacgaggtgaaccattagtgtgcagttaattactccctccgtcccataatataagggattttaagtttttacttgtaatgtttgaccactcgttttattcaaaaatttttgaaattattaattattttatttgtgacttactttattatttatagtactttaagcacaacttttcgttttttatatttgcaaaaaaaaaatttgaataagacgagtgatcaaacgttgcaagcaaaaactgaaaatcccttatattgtgggacagagggtgtaaatattaattattcaaacttaaaaatgaattaataacacaccatttaggctgagttcatttggacaagatgagaaccaatctgctgcgcacgaaaaatgaaacggttcattagcacgtggttaattaagtattagctatttttttaaaaaaaaagatcaatatggtttttttaagtaactttcgtatagaaattttttgtaaaaaaaacacaccatacgtttagcggtttgaaaagcatgcacgtgtaatacgagggagaggagttgggaacctattgtgccgaacacaggcttagtagttcgggcgagggagaggagttgggaacctactgtgccgaacacaggctagttcgggaagtgtgcacgccaaggaatttcttctccttatcttctccgaatgaacacttaggctgtgtttgagggagataggattgggaagatcgggaagagacacaaaacgagttgagtcattagcgtatgattaattaagtattaactattttaaacttcaaaaatggattaatatgattttttaagcaacttttctatagaaattttttgcaaaaaacacaccatttagtagtt

SEQ ID NO: 50819 - DNA, 568 bp, Oryza sativa
ctttcaatatgaatcacacgagatagctaagaaaagggatatgctagcttgacatgttgttagttttgtactatattattaattaggtcgggtcctccatggtccacgctcacctggtgaacataatggggctcatatatagcacatcgtcaagttcttttgcataaaatattggtgtgtgacgacacaacctatcttttccgctagcagtttttccgcgagttcaagtagatatatgtgaaaggcatccaaagcatagagtgtgccaaggccagcccttcctctcattttttttccaagaacacaactctaaaattatttttagagataagcttcttgttgttatgcttatggtgataccttagtgtaatactgcactaaattcaacaaaaagaaatcacctttgctactttatatgcattggccggcccactgaataaaaagaagaaaaatgtccactgtaatttaattgaaaacataatcagtgtcatctactcaaagaacatttgctgatgtctcaccattgtgtatatatatatatatatatatatatatatatatatatata

SEQ ID NO: 50820 - DNA, 655 bp, Oryza sativa
tgtaaagagagatataatagctttggaattcaaatataccttgattgtatatatgaaatatatacttctccaaacctagatccagtatcgactaggggaatcgcactatggggagtttggccggcagtccgctagctcatgcgggggaccggccggtgtttggaatggggtacggtagtccgtggggaactacccagcgaagggtcaggactacaacatagcggggatgaccgtcggactatcgtgtggagggccaacacaggttgaagatagcccaggcagatggctgacgtgcgcgaggatgacgatggcataggctagctgatgaagtatggtcttgtggtggccggctagaagttgtagcagggtggcccgtgcaggctgcccaggtgaatggccacgacggcggcaaagcaggcaattaattgccagttggcagtcgtcagatctagaatcctccgaccggatctgaccactctactatgcaagcggtggtgttggggacaatatgaaggttgtcggtttggttaagttgggcactgagtctctctttgtagtatagtcctacctttcctccttggactcctctccttctttgtgttgagctcttactcgggatgaggtggcttggtctacagggcattgccttggccga

SEQ ID NO: 50821 - DNA, 2212 bp, Oryza sativa
cgccgcggcggctttatacgactttttcttctcttctctctctctttttttttcttttttttttgtgggcttttttttattttgttttttttaattacggattcggtggatctggtcgtcgtttgtaaaagggaggggggaggatgcggaattgccgactccactccaaaagcggctttttccctgtttgcacatcactccaaacctaaaacgtaaaacgtaaagtggcttttctttatggaataaatagttgacctatctcgtttattatgggtatttagaaaaatttgtaaaggttggcttgtgttgttattagtgttactggtatagttttcggtgattctttaaagtcatttgattgtaaattttatcagaaaatgcttctaacaaaaggtaaaaaatcgagcgttgcacttaatgccctcgctccacttgctcctcgaggcaagtgatgtaggtgtggtagagccactactagatctcatgcttctctagcatagtgaggttcttgttacgtgaccgagacgctctggaaaggtgctcgtaggagaggggatgccgagaaagggcctatctaccagtatgagttttggataaggatgggtcctattaggtgatggagagaccagagcaggagactatgatggtgacaggtggccgtcgtgaagggtaagcagagctcgaggatcagtacctggaggaggcggtggggtgggatccacatggatttaaaggtggacacaattcatctttgatcgactggaacaacttgactgctaattttattttgtcggattagacgcacaatgttagtcacgcctactttgttcgatagctaagctattatagatcgagtcatatatgtttatgagtgccaattggtctatttcatgagtttttcttatatataatataaaaagattgaaacctgaatacaaattacatcatgatgatgaaagtgccaaggctaaaaattaccctaattaaataggtagtgatgtgacaaaacaagtgttgaagatgtatgtgtatgtgtcatgtgtgagggtgtgtttagttcacgctaaaattgaaattgaaacaatatgacgaaaatgttggaagtttgtgtgtagaaaagttttgatgtgatggaaaagttgaaagtttgaagaaaaagttgggaactaaatcaaggttgagtgacttgcaagatatgtttacctcgctagcacaacttcctcacacatctacacctaactgacgaacaaaaagattttacaaaattccatgccacacatgcatatggctggaaccacacacttacagctcaacccaactaaacaattcgaagatggtgatttctttttctatcacattaaaagttcggacaaatactagtgtgttgtttggaagtattgtatcatggtcacacatcatagtgtaaagtagacttctactccacaacgtagaatgatcattcgaaagagaaaagggaaatgatttggtcaatgaagatgacgtagaggcaaatcttgagtcgtttctccgaaggtgccacacaactacacaagactaattagttaattaggcatcaatgaagatgtcttaatcatcttctctaacatgtagttacgtgtgcatacgtacgaaggtatgatgacactttccttcttttcttaaaaaaaataaaaacgagccacgtaagagattgcgtgattttatatgatatagcaggaaaaaaaatcataagaccatatccctggtctttcagagtgggcagccaaatggaagaaaacaaaacatgattatttgggaataaaaacgtaacaatgatggagttgttctagattaattggatcgtacaaaacaaaagaacaaaaaaaaacccaccaatcactggtggagaaaccatctttgatcggtcggccaaatttcacaatagtcccggttctaataaaaaccgggactaaaaagcatctttagacccggttggtgttaccaaccgagactaaagttcatttttagtcccggttcaagaagttgaggggttcaagacagatcccgattatttttactctcggttggtataaacaaccaggactaaaaacagatctttagtcccggttatttataccaaacaggagtaaagagtaccccgaaccgcgcgccagatattatccgcgcgccacaaaaataattgtttataccaattatttttactcccggttgg

SEQ ID NO: 50822 - DNA, 4825 bp, Oryza sativa
aaccgggagtaaagagtaccccgaaccgcgcgccactcatttattatccacgcactcctctcgatctcctcccctctcattactccttctccatcccttcctctcccccttcatccccttcctctcccctttcccctcccgttcctccccttcccctctttgagcggcggccgagcgggagtagcggcgcccggcgggagcggcggcggccggccgtctgggtgcggcagaagggcgggcgggcgcggcagctggccgggcgagctcgcgcggaggccgcaaggacggtggccgggaggccggcagcgccctcctctctgctaccgattttttttgaatttttgattcattggatttgatctgtgatgtatgtgatattggatctaatctgggaattgtgatgtatttcttttaggatttgtgatgtattttttgtttgagattttgtgatgtgatgtattgtgatttgtgatgcatttctttccaatatgtgatgtatttctttccagatctgtgatgctactttgatttggggatgatttgggaatatgatcggggatatttagggagcagatcgatttgagaaaaaaaaaataaccgggactgctcgtaccaactgggactaaagatagatttttagtcccggttattttacccaggactaaagatgggtatctttagtcccggattcgtagtcccggttgtataaccgggactataggggggttttcaaccgggagtaaagcccctttcttcatcagtgaataatatataagcaccgtagaagtgttggtccattggaatttctttgaactttgagggaataaatgatcagttgcaatgtggagccacaggttcattgcatgaaggcaatatatagattcattgattctgatgtcggcatcaatttttttctgtttctgctacatgtaacactcatggaagcaaggccaacctttaccaacatttgtctctggccaagaaattgcctcttagattctcaagtattttttttttaaaaaaaactgaacagtttgataggcatgagtgatgaagaaggcaaagaaagtgacctacaaggcaactgcaaccactacatatataactgatagtgacatctatttaattatatagtatacttttgtaaatagctttgattttatttttccaagccaatatatgtaactaacttatttctagaaacagacattcatggaattccaaggtttattttttgcaaggctggaatgtatgctcatggttgtctgcatcgcaacaatattcatttggcaataaggttacattgttacgaataacggttattatgcatgtttatttttgaagataaaatgcctcttcgatttgtatgaaaaatatagtagttttagaggatttcaatcctatgaaaaagtttcctgtaaaagccttaacaaaggattgaatcatatcctatcctttaatattcttatagaatgggtaattatagattgtagagaaaagttggcaagaggtccaacctattgaaaaaatttctttggatacatctctctcatccgattcatatgtttttcctgtggtccaatcaaatggtcacttatgtgtttttttactatgttttgtaattctctattttacactagtattcatgttggaattacatggtttagagaaacgcttggggtcttccggctagctccacaaggtggtgggctagacgatctgggttcgaagtctcaccctttctaattatttgatattaggttcttttctaatattcgtgtcttttataattacttggtttcccttttctcgtgcaatatgtttgatacgggacaatttccagttgccaactagtccatattctctgctagccagagccgtgctgcatcaaaaatctgatctgatcagagagaatttggttcaaattcaagttcattgcagccactcttaatgcatacccagattccattccagtcaacatttattgcataaaaagattcacctatcactttgccatatatgtatgtatgtgtgtgtatatatatatataggtaaattattgctacatggagtatgggctccaagattcaaattgtatatacccaatttgaatgagtatgaaatttttttaaatgtttatatatgaacattaacttctttactaacaagttcaaataagtttaaactgagtttgaacatttttttgttagattttggttctaggtatataacactcaaacatataattcgttaggtatgtaataatgaattgtgaaataaagttgagtttgagttgtttcgttgttaggtatatgtatgaattaaattcatatacctaggtatatactcacaatttgaaaatttttcaaaatttgagagaatttgtgtgttttataccttggagcccgggcaacatggagtcccatatggatatcatatatatatatatgtatatatatatatatgtatatatatatatatatatatatatatatatatattcttgtctaattacttatttcagagctcaggatactattttagcctaggaaattattttcctaaggatttgtttggttaattcctcctcataggaatggaagtctatgcggagagacgtgaaatcaaacgtcccttcccctaaaaataaattccttcctgtaggaatttactgaacaagccctaagggatgcccatgaaagaattatccatgagtcatatcaaataactcacattgtattaactatataaccaggttaaattattatctagtgtaaatgttactccctccgtcccgtcccaaaatataagcatttttagcatagtgtgaaatcaaacatttttaacattaactattagtagaaaaaaaattaaaaagaacaataatgtaaaattaatgttactagatttatcattaaacaaactatcataatatacaactcttttttatttaaaacatcttactttcatagattttgttggtcaaaatagtatctcaaagaccatgtcgaagtctaaaatgcttatattttgggacaaatggagtactaattaaacaagacccacgagactatgatgcatatgctagctagttgatcataggaacaaattagcacacatctgtgaaagatatgggtaccggggtactgatacatgggtaccggggtactgatacagcctacatatccaactacagataggccatgggggctacatccatgtaataaaacatagagtagcactcagttgccatgttgtcttatgttgcgaggcagggtatagagtctcggctgaatactactttatatagattaggaaacagaagccgtatctggttaggtttctcttctcgcaatcctgcttcccaacctatataaggtgagcatgaagccccctcaagggaaccagattgaccagacaaaagatccatgaggacaacacaaccaagatcaccatgatcaatcaatatagctgatccaatccaccaaacaagagtttgatgttatctctcatcaaggaggcttgaaacatgtctaaactcttgtctacttgcatccatccactttaggtctcatatgctaccccctttattatcgttgataaatacatcgatagctggtgcagcaggtaggggtgacgctgagtttcccgtcgagaagtgcgattgaatcaatcttaggaatcgttggattcatcttcgccccaaggcaaaccttcgctttggaagtttcgtcttctttaacgatgactttggaaatcactcctctccgactcggattcaaaccagtctggaaggctcagaccactttgatctcatttggtctcccaaacaccgcgaaggcctgttccaagcttgttctctccgacacaggctcaatctcgtcagggagatcaaccttggcgagtttgatgattaaatctccgatgtcgctgcgtttttttcccttccaatttatcattgtttattagattgatttctaatcatggatgaatctattggtgttttttttattgttcatatataattccacggcactactgatgtgagtgctagcgattgtcgactcgtggtgtcactatgtagtcaaccggccatggggtcttccctggcatgcgtactctgtttgacctcgctttcacggctgctcgactccgccgctactgatggacaacctcgtattcaccgctggcttccttcactaccacagaccgctaacctcacaccttcacggttggcctactaaatcaccattgatgggcgacctcgtcttcaccgctggctgcctccacagccgtcaattggtaacctcaccttcacggttggcctactacgccgccattgacgggtgacctcatcttcaccattagccacctcctgccgtcaacgggtgatatcgcttccatggctgaccagcttcgctgttgctgatagacgaccttgttttcaccgccggttgtgtccactgtcgtcgaccggtgaccttgccttcacagttgtcctattaccccaatgctgatgggcaacctcatcttcaccgccggttgactctgtcgtcgccgacttgtgacctcgccttcacggctggccaactttgccgctgctgatgggcgacctcatcatcatcgcctattgatgcctcgcccctacgccggttgacttcgctacacactgatgggcaactttgtctttaccattggccgccttcgctacctccactttgccgaccctggcatctcctagaattccgacatccctacatgcgccgccagacacgatgccgtactaatctactacaacaggtggtgccctaatcttttagcttta

SEQ ID NO: 50823 - DNA, 2023 bp, Oryza sativa
atagaaatctagtatggtctctatattttagaacgaagtagtatttagaaattaatggaggtagcattatagaagtcacttcttgtgtatccaacagttagctgtcagtgtcatgtaatttgtcttggaatgtttacagtaaagagcaaaggaggagctgctgcaatgggaggagctgttttgaccatggctcgtaggcctgattctatggccattcttgctcttatagttgcagttaccatcgcgataactatcgtcgtgcgcctatatgttcctctgcaagcaacatgatcttcagatgaacccacggtaagttcgcaaaacgcaacagagttcttctctgatcacttcaaattctaagctgtatgtatggaaaatcgacagagttgaattgtataagacgggaaaaggcctactagtatgagttctactagttcatttcctagcctgaatgccaggtgtatgatgaaatagcaaggcctggtaccaagaggcaaaagaagataagaggttcagattaatagtttttctcctaagtggtagattgctagtctttcttttctgtagggtacgtcactgcttcagtgctgaagaacatcacaaaggttgtgacagggcaaccggcaacaaaactatgttgaaattgtgatgaacaacatggcagtttatcttaattattcttctctcttatcattatatatcacccttgttagtaatctgtagtttatcctctactctggaaatgaatcaataatctaagattagccgattattctacagtttctgtgtttgctgccaaaacagctaacaactgatgaacaagaaaagttattatggttcaaatactcaacagcacctgctttgacaaggcatatactcactgttgtgatgtcttgacatcaacgttgtggcatcttttttcccacctatttgatactgactggatgtcaattaattgttactggacgtcagtgttgtggaatctttattactagtattttcttccatcgtgctagactttgatgaagtgtttttactggatgtcaattcttgacagccaaatgttatcctaagtcctaactaatcttaactctccaagtaaatgcaagaaaacatcaaaacacttacaaatctaactacaatcttccagcctttgttgtgaattgtgatagattctcacaaaaataatttgaacagacgggatcttagaaaaacatatagctcacgacaggaataataacaatggtgtgaaatagacgacacgttccatgagcaaaagctttaaaacatagggaatgttgatctttttgtgggttgtgacttgataatttgcttttgcaaatctcttgccttttactggacgaaagcttgtggtcttttacaatgtcaaacccaatcaaaggtgtaaaataataagagccagcaaatgtaataattcatcatgttcacaatatagataggaattaaaaaaaacatctataaccaagtcactcgcatcataatatatatgccttttttttttgttgaaacaattcattgaagtacatacaccaaaacaataatgaatatgaaacactgctagagcattagagatttgctgcataaaaatgcagaatcagcacccgttcatcctcaatcacaactctaatgaaccttaccaatgtcatgcagcgcattctgggtggcacagactcctaatagctcttgcagcttcaagcagccaaaccagctatcctttttttcttacatggatatgcacatcgagctcttgtataatacattaaatatttaaaaaatataaacttaacatataacttaaaacaagtgatctaacaaatgcagtggagaatatatatttcaatccgtggagtaaataatccatttcaacaatcccaccatgaataatatgaaaactaacagggtcttatatcttcttgcttgaattccaaataacatagtactgctctttatagagagccaactaaacaactccattctaatttcatggaatggaaacaaccaa

SEQ ID NO: 50824 - DNA, 700 bp, Oryza sativa
agagaaagccaaccgctgtatgatgggaaaatatatatatactacttgaaaaataagatttcacatgtagatgtaacattattgaaagtatgtgtcaaattttttctagaattttctgtgacatttgctagttggtgtgcacggaaaatttctgtgtatagatatgtttcccataaattaagactagaaagtgcaatatgttctaaaccttctccagcatcgcaaaatcatgctcacaataatatcattcatgaaatattattagtttaaaattcatgtgttactcacttacccttaacaagtaccttaattacacgactcgtaaaaaagacgagtcatctcgatttgaggtgttgcccaacacacttatacgacagctttgagtcgaggtccaacaacctgcccacatcgtcgtcgttcaccttacgtacgtaccaacacactgacctatcatggttttccatcgtcgtctttgtatcgcaccaccgctttgtagtggcagagtgatcttggcggaatttgcaaggcatagttcgcatagaagagaagatgcgggtaacgacaaaaacaaaatgtgagaacttaattcgtttgtattttgttgacaaggtttttttagtcctttttaattatctattcaccactaaatgatttcttcctccctgttatgatgttttctaaccgttagactactttaaaa

SEQ ID NO: 50825 - DNA, 5456 bp, Oryza sativa
cggaggtggaggtggccatggcggcggcggcggcggcgagagggggggcggaaatggagatgggagagaggaggtgggggtgttaaagtggatggacggtgaggatggcattggcattgggcgtatcggaatcggaacagcggctgcgtgcacccggtgttcctggaccatagtggcactagtccactcactcccatgcccacattattaccctcgtcttttcgttatcttattagctaaaatttaaattttcaaccttaaatttggagctgatcttgggtttttttattaaagtttatttttcagcctttgcttttagatagataagaacacatatataaaaactttattcataaattatttttcatttacaaatatgttgtaagcgaaacaatggggatgtgttttgatatagctccggatccaaatccatggtagttgaagtttgtaagttaattaaagtggtaaatttcatctaaaacattaacaagattatttatctaaaatgttatcaacatagtcaaaatctagatatatatagatttgtaaagctttgaagtgaagggaaccgttcgaagtgagcgctttgactcagcccccgcgtcgctctcacgggcgacacaggtggcgaccccatcccgcgccaccgccggtttcctccctcccctccactgcctcgccgccgctagagccagctcccgcacgtccgtgcagcgacgaggacagcggcggcggggcctctgcccagatcctagcttcctctccctctagctcgtctcttcctctccccccagctcctagatctggcctatcgcgagagctgaccgacggctaggacggcggtggcgaggaagtggcaaggcatcggcgacggaatctctttggacggcggtgggggcggcggctcgacggctcccgtcggtggaggcggcctaagaaggcggtggcttccgtcggcgtcgatggccctggggctgcgacggaggacaacagtggctcccgtcggcgctgcggccggcggcggtggttcccatcggcgccggctgccctagaggatgtggtggaggacggcggcagcttccatcggcgccggcggccctagaggctgcggcagacggcggcgacggctcccgttggtgttggtggccctaggggctacagtggctctcgtcggcgccggcagccctaggggttgcgatggaggacgacggcggcttccgttgacaccggcggcactaggggctgcggcggcccaggacggcggcgcccccgtcggcacagggccctaggggttgcggtggcttgaaacggtggcggtctgagcactttggatagtagatgcctaggaatctggcaaagtggaagccgatcctgtcggttcgtgtctagttggctagttccgactatacgacgaatgacgacggttgagagtgggcttagaagcgacgcgtgacgtcagctcatctgaaactgatgaagatggcacaaatggaggtttgcatcaatggcgcactaggggcggcagcgactagtagacttccactcgtcaaatatggctgtttcaggagaatatggtgggagacagagaaccaggatgtgctgaggtcgtttgggtttattttcttttttggttgtgttctccttcttgttgagatgtgagtctaaattactcttgtatccttttggccgcgtatatccttcgtggatatagaggccggattaatgaaaatccattatctaaaaaatatagatttgtaaagctaggaatactcaacttcaagaaatcttggatatatggagatgtgccaaaaggacctatggtagcaagagagttagtcctttttttttctaatttaagaacgaaatattatacgataggatgaaacatgccaaagtcaataatattatacgataggatgaaacatggtcacagtgataccagataatttagacaaccctttccactttccagataaaataactagagcgaaaatgctatttctacatgcaattatcgccattgttaattaccaacaatgcatgtaaagacgaccactttcctgcagctagaaaaaaaaaccaagtttgtttcatttcgtgaaaggaggatactggaatcgcactttaataggtaaacacgatttcccttgatgttaattttaatgtgatttcccttgatgttaatttaatgtataaaatttgattaggattccctacaaccagttataaacttggaaaaaacaaaggcaatccacgtgaccacatctcatacattgtttttacatggttttaaacattttcctatatactttgctacaatattaataagtgcattacaatagctcttacattacatggctatgcctatgatattttcatcatcgcatggacaatacaaatcttaccgccagcggcggagatagggcttcgctggtggtgtcgccgctgttaattatcgataatgcacatagaaattagttagtgaccagagaacgctatgtgttgtccatgcttcacagtgtcactggctcagttacttattacttcctccatattttaattccatattttaatgtatgacgccgttaacttttcgaccaacgtttgaccatttgttttattcaaaatttttgtgtaaatatgaaaatatttatgtcatgcttaaagaatattcgatgatgaatcaaatcataataaaataaatgataattacataaatttttttgaataagacgaatgatcaaacgttggaaaaaagttaatggcgtcatacattaaaatatggaggtagtacaactctatccttttatatacatgttctccaccaattacatgcatcgattactaataccatctcgcctttattgagtacataaacactaaggatgtgtttggataatgagaaatgaagggtgggattgggattaggaaatgaatgaagggttagaattaaatgaaagagggagaataaatagttaggataccttttgatgggtgggaatcattttcctatctcattatctaaacaatgcctaaaaacttttctcactagtatgagcatcaaagtagcaagtacttcctccatctaaaaaataaaacctagaacatgatgtaatatattctaatactataaatttagaataataattgtttagattcgaaatactatacagtaatgtgttatatcatattcaacattgagaatgtcccaagtgttcaacattgagagagaagaaaacaacagctgcctagcctacagaccgggtccagccaaaaaactacaagaggttgggtcccccatacgtgtagccttgacattgcagtagtggccatgtgtgcgtccttgtgattgtggctgagacgagactgacgagcggtggagatccacccctgtggggacaggattgggcaccgacgcctcctggccgtccgttctccctctcaactctcagaacaaaagaaaagcagaggagggaaatcttcagagttggcgagtgagacgtgtctgtttctgaagaaatgtaatactccctccattccattttaaatgcagccatagttttccacatccaactttaatcgttcatcttatttaattttttttaaaaaaattaaaaacataagtcacgagtaaagtactatttatattttatcatttcataacaacaaatatactaattataaaaaaatttaaataagatggacgataaaagttgagcgcgaaaacttattgttgcatttaaaataagacggaggtagtatgtagtatgttgtttggattcagttgttttgtagcgatggaattcataaactgaaatgagactggaaaagagctgctttaataatggaatacattcggactttgcttgattgcttcccagaagctatagtcccttgttacaggggccgtacaggagttgatgatgaaattggcgcaattgtttttagtaatttggagattttatacgtttgattacatggcattctgtattggtttaggaagtagtagcagatggctaaatgtgcttaacaaaattgtactactactacaaggtttacattactgtcggtaaccgtggttaccagtcttaccacggggtacggtaatagaaaaaccacggtaacctccttaaattcaaataaatttaaaaaataattttaatttttgataaattttgcacggtttcgtacagttttttaccgcggttaccgtacggtaaccgtgcttaccgccgggacgcggtaacctggccccggcggttttggaaaccctaactactactactattacaacaacaactagtatattttgtaagatgataccgtatttgatagtctattggtcttgcatacgcatgcatggagcaaatatgtgttcttgttattgctgtataatttaccatcaagggtctgtttaacaaatggacatgcttagctggacagatctgaatctcgactccaagaataaattgattttgttctttagtccacgatcctctcaagaacctgccagaacattcatattacaaaaattcgtactacagacaaattttgtcacaatcgcacactgaaccagattaactgaaggatgtggccaccctaattaagccattgaatgtctaacttggggaaatgggaatagtccgaagttgcattgcctctgaccatttttgttgggcagcttgaaaagataatacctctgcatgctgttattaggatctgaaagtctgaagtctgaacatgtagtatataatagaagagcagcgacatggatggagctagcttgtgattgattgttttttttcgctaacgcattttttttcgcgaacgcgcgcgtgattgattgttgtttacttaatttggtcgataaagatgcattttcttttcttaactagcaaaagtgcccgtgcgttacaccaggtgattacggagtgtgtatattgaccaaaagtattgtttggtttagcaaaactgcccgtgcgttgcaacgggaagcgtacagattagaaaaacatgcaattaattaaaatacaaattcgctgaaatatttggtatttttaagtaggtatgtgtataattaaataaatttataagtaaagcaagtatgagaaataaaatgacatggttaaatctaattttattaaattctccatgattagttacgctctttgaagttttattggaattttcagagcttaattattaattttaataatacaaacaacatttaacaattatttaattagaaaaagaaagaaaatacttctttttaggtttgcttagaaataaacacattcaataactataattgtaatgcttctgaaaaaacgaaatactaaaaatgaacctcttctcttttttttttggcccgagggatgtaaaatagacttatttccgtcccatcccggtcggcccatggccttatgaaaaccttaaccctaaccctccccctccat

SEQ ID NO: 50826 - DNA, 2363 bp, Oryza sativa
atgttcttcaacacctttgcttcatttcttgcgtgctttttgcaaaaagatatgctcaaatgggagccttcgccctgcaagtctaagcacctttttagctttctctctttgatgagagagctggtgaaactaaagcttatagtcccattaattcatccaatcggctagttgtcgtgacctttacagaaccaatgatgcatattgttttctgtgtggaagaagaatcctcttttgcatggattgtaattctcatttgcacattgacctttgcacttatattagtctcatgtattctttcaacacctaaaagttttatcataagtatttcatttgcccatacattgacctgctaaaaacctatatatatatattctggatgagaaatccttttaaaagcttttctagctaggatgagtttaatgcatatatatgaaaccagccacacacatgatcaacctaacattgcacaatgctagcaagattataatatcgagatgtcaaattcaatcattagcaatatgaaaattagtgctgttgtggtctgaatatgatagattatctcttttatataaatcaatataaataattacctgttgaaaaccaacactgatctcataatatgatttgtaaaaaaagggtagcatatgtgtgtcccacttcatttttcatgatctatatgggcaggggctgatgctttaatttagatctcatctgtaattaaccagctagtacttttccagtagccagggctttctttctttgattatttgcttttctttcttgtttgtttcattcgcgaaaagactatggaccatgcataatgcatctttgttttcaaaaagtcactttctagatggaacctcgacctgagaaatcatggttttcttgtagagcttaaagtttggtcatgcttccttttactataggaaatagtgaagacatcccataaatcaataaataattagccagctaggcatgtcttgatctcgagaaatgttcatatttgctatgagattttgttcaaatttcctgtgaaaaatccttgcagtccaagcgatgccttaactattttgcatcggggcatagtactggtactgaaccaactaattaattaagcttagagagtggcttagctagctagcagagataccagctagctagtgatcataattaatttctaggggatttccattattaactctataggttttttttggctaaaaaagggtataccatttcgttgaaaaacaaggaatcaaaataacctatgctgttatcctatttttgcagcaagtccctgcatgtaattagaatattaaaattagtacctattttttttgcagggagagactacattaagtatgccttcattacgacattaatcgtgccctaactaacaaccttaaattggagctgtataaattagtcacgtgcagccagtcttgattaattcttgaaactttagttaatcatttgtcaagtgttgcttaatgttgtatccaccaggcaaaaaatagtaccacttaattattttgtagcaagctatagctttcttcagtacttcccactgattgcagtgtggaattaaattaattaattagtctgcttctgacttcgttagtttcttcccctttttttttctgaaagaacgttttcttccctttcttctgaataaaataaaggagatgaattggttttcatacaacctggcactcaattgagagaaaatactgatagagtttttttttgaaggaataatgaaagagtttcatgtgcaacaaaacttagaaattaaaggtgccaactccagaatcagaatgtgcaagaatgaatctttcttcctgacttgtgtgcgatgcagctgaaattttaggtcagaattattcctgttctaaatgtagccttacctcgtttctgagcccaagtgtgtattgggtttgaaactgatagtaatggcccaaatggcttaattacaaggaggacgctctcttggatcgctaactaattgagtccattccaccaacagcaagattcatagcaggccttcatgcgggccagagcccactttaggcccagccttctctgatgcagttcagtgctgcttcagttttcagatagtgacagatggggctgaaaaattgcagatcgagtcccttttccttcatcaccggagaccagggtttccccgacggtaggcacggtaaccacggtaaaatttaaattattttctaatttaaaatttaaattattttctaaatttatttaaatttaaggaggttaccgtggtttttttaccgtaccccacgataaaactggtaaccgcgtgattaccgacggtaatgtaaaccctgcagagacataga

SEQ ID NO: 50827 - DNA, 562 bp, Oryza sativa
gttctttccccaactataacaacccacttccctcgttttccacgcgcacaattttcaaacagctaaacgtcacttttttgcaaaaagtttctagaaagttgcttaaaaaaaatcatattaatccatttatttaaaaattagtaaatacttaattaatcatagaaaatatgttgctccgttttccgtgcttagggaatgagttcgcaactcaaaacaatgaacacagcctaagtgttttgagttttgggtaacatgaataatgttatagccttgctggcctaaccaagtcttattttagcttaattggagctatagcgtattttctataaattgcatcatttataatttgtgatttaatacttatttcacccattaaggtttagagatgattttcatattaaatgtactactttttattatttttattttactgtgattaaggagtacatgttttgtgcaactagcaggactccgttcactttattttgagttcactttactttcgtcgacgatgcggaggaagcactaggcctcgggggtgaggtgagtggctggactggct

SEQ ID NO: 50828 - DNA, 1831 bp, Oryza sativa
agtgagtatcggctgaagtccgaatcggctacgactaagatcggcagggttcgagtcggactgggttagcggattgagccgaatccgacaaaatatgacgcagcatatgttgttggtttaggttgacgtgcttcaagatgattgccacacatggatagagtcctgagaaggcaattgtatatattagttaggatattttatgtaatttccttagagatatgtttgggcaaaagtctgccgcaaagacttatggtattttagagtttgttagagataagagtcatgtccgatatgaacatattttgtaattctcgggtataaatagaccacgagccccatgtaatcaaactaacacacgttcaatacaatctcggcgcatcgccaccctttttactttcgttttattcgacgagttcttgcttttgggttgagctgcatcggtttcgatcttcaacaagagataaaacttgctatggcggcttacgttctcgggattagtgcttccatctttatgatactctaatcttgtttatgtaatacgtcgagttatcatatatcttacataatcttcgacgatatcgttatctaacctataatcggctaacatctgtcagaagagggcagccgattaggttaaataccgacgttgacttagattatatatgatatccaccactctatgaaatttccaacggcttgattgtctagatattttctttcttttcatacttatagctgcatcagttgagtttgatcttatgagtcgtgataagaatctcaatctctagcctgtctttggttgccgattagggtagtatcgaaggtttcagccgatcttacgtgatttaactacatttatcttatttgcgttattgacatgttaaatctgccctttatgttaagatcttgttacatctaagtatattaggctttttgtttggtatatcttacttactttaatatcttaatatagagtggtatcggagtattagccgatatacgctagatctatctgatcggctttgctataaacacatatagtcttgttattaatatatatttcgatctaagtgatttatactgtctcggcacggtgaccgatctatctcaacacttgatttaagtatatatcgatataaggactatataccgttaatatctacagccgattgagcagatctagttcttattaatgactgtcgatcgatgcatttatgacatcggctcaaagataaatgatatgtcatcggcacttagccgatcggctatcgtttatggatttaaccgcggtttttttttgtctttgtttcttgttgattgcaggatcaaattaactggtacgctagcatacctaaagacaagtttttgacctgcactggagttaagcagatctcccggacctcgtgttttcacatcaacacgcttttggcacgcctggtgggactgatcagaagtcagaatcacaacaacgttttctcatggctgagaaaccgccggcatcaccgtcttcagctagtaaagatgattcttctaaatctaagacccagaagcctggtctatctgaagttaatgagagcaacatcatgcccatcactccggacaagttgaaacccgagcaacagaaggatcttgaggcaatgatgcagcaagcatgaaaccaattcttgaattcattcatggagacccaaggttcagaagtataaagtaaaagtaattgttgatgttcccgcaacaggttcttccaaggatggagaggtacaacaagttgcagatggtgcagctcaatcaagtgataaaggtgctgcagatggttttcaaggggttcaaggtg

SEQ ID NO: 50829 - DNA, 525 bp, Oryza sativa
cataggggttgagatccatttctttccgtccttgactgcaccatctggcaaagttatcctgaagaaagttgcagggaaaaaaatcacatgagaagaattaattgccattgccattgtgctgcacattgcaggtcacagtgtgccacatttgtattgtaactagcaaaggtacattgagaaaaggaaacctaagcaccatataatcaagggttttctatattagaatatttaggcagaagaaatgcttgccgtctctattttcttattaaagacagatggatgttaaagttgaataacattatggcattattatgcagtttgcgcagcgcccattttgtcgtcgcatcgacattcaaatattcccaacactcaaaatccgactccaaattatgcagcacaaagcatggctatcgacgatattcccttggtgtgctatatgcctatatctacatctcaatgcctgagacatctgccatccatgtagtatctaactccattttcatctataacgcgccgcaagcatta

SEQ ID NO: 50830 - DNA, 723 bp, Oryza sativa
caagatttcatacttcaactgtccaacacttggttgaaggattgcaaagctatcgggcccttctatatatcaacaagccatgtctccatttccttttttgacacttaaaaagggattaattatttgtggtagaaaaatgctagatattgttgaagacagttgtatctaaagcagggatatttagatatacctaatgtggtatttaataagtcatttttggcatgtcaaaaaatctatgcaaactttgaagtatcattcacaagctatagcaagtttggcatatattagttttaccaaaatatgtgaatttcaaggccagtgagtgattctattcatatgtctacatatagtatatatgttcaggaactcaaactcgggatttgaagtgtcataaattatttattttattcaatttccacatattcttttagcttggatatactaagttcaaaacataaaacttgttctattcaatacaaatatatatgactgcaaacctagctagctagaagttaatccaatactgaaaatgcagatgtgaatccatcaatgcagcacacgattaaaattttcatatatatatgcgtgcgtggttagggatgttgcatgcatgattgcaactgctacgctgaacttgaaagcttaaatgagaaagcattgtccttagattgttggcccaggttggaaaacactccttttgttttcttccgtcttaccatgacc

SEQ ID NO: 50831 - DNA, 595 bp, Oryza sativa
aatatctttacatagagtagtatcggagtattagccgatacatgctagatccatctgattggctatgctatgaacatatatagtctcgttgttaatatatatttcgatctaagtgatttatactatctcggcatggcgaccgatctatcccaatcacttgatttaagtatatattgacataaggattatatatcgttaatatctatagtcgatctagtagattttgttatttcttacttattaatgattgccgatcgatgcatatatgacatcggctcaaagataaatgatatgtcatcggcacttagccgatcggctatcgtttatggattcaaccgcagtttctttgtctttgttcttgttgattgcaggatcaaatcaactggcacgctagcacacccgaaggtgagttttggacctacactggagttaagcagatctcccaggccttgtgttttcacatcaacacgctttggcacgcccggtgggaccgatcggaagtcagaatcacaacagctgtttttcctcatggcctagaaaccgccagcgtcgccgtctttggctggtgagcctcgctctgttaaagctaagatcc

SEQ ID NO: 50832 - DNA, 1283 bp, Oryza sativa
  unsure (1)..(1283): unsure at all n locations
aattcctaagaatggaaccttacgattctttctcataattttgtattaacgctatagctttttttcgctaagacctgtaaaagttgaattttaacttacgtgtttaaagagtgatatatcacatattaatatatctttctatttttttaaaaaaataatataactatttgggatatcttctcgagagtttagaatccacttctttatcttagataaatgcatccccttccttactcggcaatatagtgcgcgtgtatactatctctctctaaaaacataatctctaagaacttctaaaagaaggccttgtttagttcctttttaaaatttttttaagtatatgaacacacatttgaagtattaaacatagacaaataacaaaataaattacagattccgcctgtaaactgcgagacgaatctattaagcctaattaatttgtcattaagtaaatattgtaaccgtaggcaccnatattgtcaaatcatggcgtaattaggctcaaaagattcgtctcgcaatttacatgtaaactgtgcaattagtttttttcgttcacatttaatgcttcatacatatgtacaaatatttgatgtgacggaatttttgaaagtttgaaggggactaaacacaaccaaagatatattttctctttgtaaataatatccctatgatatcagtacgttgtttaaagtataaacataatccccatcactatctaaataacaaaggagcagtagctgcatcaagtatctaaaatcaccactactatactgtttgactgggtatattttaatcttctttagtcgcttccaccgtcttgttcctccgcatcaacgccaaaaatccgcacaacgattgatggaggcgccaacactgtccctgctccatctccatgtttagccacctccgtttctgtctcagccagtggcaatgccaccgccgcggcgatggccgccgaagctggagcaagtgtaggcggcgccgcaagttgtccgcgtggcgcgaggagagggtaaggtcaaggtacttattgtagtgctccctcttgtggccgccaagtgccactcctgtcagttactatttcccgcacacattgcacgggtgcttgccctccgtcttgccggcaccggcgccgccactgccgccggcggcagccagcttgtccctgtttgatgtggccagccacgtggccacccatcccctggtgtgtcttatactccatgccgcaaccctcgtacttgcacctgtacggtccacctgatcgtgatactctaggtaac

SEQ ID NO: 50833 - DNA, 527 bp, Oryza sativa
ccatagccgatgacctggttcttctctttttactggcatcggctggttctctgatgagcccttggagaagagttgaagtctggggggcatgatagccgatgacaggaggagatggcccacctccatttggaataaggcctggtgcatactctatgtccctgccactattggtctggtgaggaggggagaactctgtggtctgcaagtcagaaaagaaaattaattaagttatgaatcggctaagcaattatttaaacggagttaattaaatgaagacatacctgagggataacatctggaaagagatctgtcatgtacatagaagccgattgatggaatagatgcaatttccattcaccccaccatctgtcaaagtttttgctcctgaactttgccatctctatattttcaatgatgcccagaggaggtccttggagattgagcagccgatccgtcatcaaggttgatgaaattccccctcagcactggatcttgtcagcaaagaataagccgattgggagttggcc

SEQ ID NO: 50834 - DNA, 715 bp, Oryza sativa
tcctgcagcccatctaactttcaggttataaaattttataatattgcctatattcatatggatgttaatgaatctaggcacatatacatattcattaatatatatatatatatatatatatatatatatatatatatatatatatatatataaatgtggacaatgctataaagtcttataatatgaaacgaaggaagtaacagataacacacacgtacacgtttatgttcattggttatgccccatccaaggagctaagacaaaattaggctacagatcaccggtgttgtatgcttgtgtacatgggtttgcctattcctctcccggacagatcaaagttttggaaattacagtaattttggtttgaattaaatttaaatgttaaacaaaatttggtcacatctatataaattttgctaaattcaactttaatgaaagattcaaaaaataattaggagaaatagttgcttgtcagaaggggtgacaaaatccagaaccttgatggtttagatcttgctgacgggtgggaatcaaccatacattttagggatacatagaaatacaaaacagtttgaattttttaagttattattatccaatatatataagtgaagaatattgtaacgccccgcaataatgtgaatccactttgaatttgataaatgtattgcttgtgaagtatgtgttcgcgtttgaggaaaagaaaagagagaat

SEQ ID NO: 50835 - DNA, 546 bp, Oryza sativa
gtccttttaaaaaattattttacaaatagctccttaaaaagtggaggcgcctctaaatcgggcacccgatttatgaacatcaactagatcgaacatgtttcactaaacaaatcgaaaaaaattcagtatttttaaaaagctgaaacacaaccaaatcatctcatgaaacattttgctacaacgtatgaaacaacggtttccaaaaaaattaagcgttgtttcaccctatataaaaacaatgttttagcaaatatcgaaagaatgtttcaatttactggaacatttgatctatacacagtgaaacattatgagtacactatgtgaaatattttttgtggaaaaaaatgaaacggattcccttaataaagggtttctataatatgtgggtgatttgttgtaaaagaataattcaattcactgcaacattttatctatacatagtgaaacattacgagtacactagctgaaacattgttagtggaaaaaaatgaaacgaaatcccttaatagagcgtttccgtaatatgtgagggatttgttgtaatgg

SEQ ID NO: 50836 - DNA, 552 bp, Oryza sativa
atcatcacaaagttacctggtatgttgggatttaggcaggagtagacatgggaagcagaaatggtaaaaagatacttaaccaacttcatccagattataacagcaacctaacacttgctaagcatctatttatgtgacttctcgaatacatattgaagttccaagaatcctagtcctgtgaatttctagatgctattaatcatacagcaacaacgagatgattaccgttgatagctccaattcatatttaaatccaaatatctcgtaaacataattgatgaagtccaaaacagccttaacttcgtccttgatctgcaacaaagaaagaactcttaagaaaagtaggcccttatacaatcaggggacactatttaaaattatccgaagcacagtgcagctgttaaaaggaggttgtgattaacaccatctgaaacattgtgaaaacaaatgggaatacaaactaccatccatacagtatgcaagtcatgaacatctaaatattatgagcttctggtgcctaaactaatttatgtcacacagtgtaaatacact

SEQ ID NO: 50837 - DNA, 813 bp, Oryza sativa
tgaaagtcagagacactcgtgtggtccttgatctgaaattaggttttgctcgcaacagtaatgagtaacagttaatatgggcctatatcacgtaaatgcatgatcaggaaaaaaaaatactgtgtcaaccagactatagtagttggtaaaactgctgtacttcacctatagagaccaggctcttatattcaagagaagaaataagaggacattttttggtggaagctgacaaaagaattttggttcacggaattcgaaacttaacagagttgatattagaggagagcacctcagtcccagtgtgatagttttgcctttcacataccacttattataaggcgtaacgctgattagcaaatataaactaattttatatataacttctacatatatatattttagcgacttaaaagctaatgttgaaaataaactacgataaaaagcatcaaaatcaattttaaatttaagttttaaaatttaaattttagctacgtccgataagctttgcgaagatatgaaatatcaaaatcaacatgcaaaatgcgttgacagatgaccccatgatggaacatttaagctagctttgcgaggatatgaaatgtcccacgagaccatgcgaccatacgccgaatctgatctccagtcttaaactacaaaaagtcagcgcctaacagttgacagttggaaagcatagttgttagtacatcaaaatttatatttggactttacaaatgcaccaaggaaagaatagggccaatgatcaagtagtgggaagatgtttaacctccttcccacctattcaaatcctcttat

SEQ ID NO: 50838 - DNA, 668 bp, Oryza sativa
tatgtcctcatcatgagccgtccaattttggatactctcagtttctcaaacgtgtcgaattgctcagcagtacatgtacagtaatatatatattgtagaagtgaataagctaaacgagggggaataattaatttgattgtgatttagcatgcttaattgaattgaccacacgttgcaacttaacacgtacgcacgtataccatttatatatcttttgctactttctttaaagcaaaccaaaagaaattagaaaacgacgagactgaataaagttaaatttatgagaacaaatcaccacgcatatgaacaaaaaaaatggaagatgatatgggatgatagagcagattaaataggaaaaaaacggaagatcagaatatgggatgacaaagtggggtggttatttaatctgatgaatttgaagtgacttattttattttcatgcaaaatattcctgtaattagttattactaaccaatatccaatctaagaagacttctcatctagaggttactgccatcattcacaatctcttggatctgatcgagttgagttattaaggtaaactgccattgacgtgcatgcatcccatcagaaagtgacactgcatcacacctaagtggatgagttaaaaagagggtgaagcaactagaaaaaaaacccatttaagc

SEQ ID NO: 50839 - DNA, 1112 bp, Oryza sativa
  unsure (1)..(1112): unsure at all n locations
gcttaattagttatctctcctatgcatccaagcttgaagaggacaagggaaaaagatgtctaatttcagatcgtctctccagcaacacgtacgggaccatgataatgtatgggtttccgtttggaccatcatcgatcgccgcggctcaccggcgtgcacagtgggagccgccggctggaccatggttcacatatatagcaaggggccatttggacgcatctccctgtttaactggtttgattagtcatgccagacaaggtttgccttattaaaccctttcattggttgacagagctcacattatttaattttcttaaagaaatggtcacacccctggctaaaaagaattgttcaggtaatccatcaggtgctttgttttcctaattattcgcaaatttatatacaacatgttgtaatataatctactctagaatttttttatcacaatagctaggtatatggtccagttgaactatgcaatcagctttaacttgatatttttttacataataagtagtaattagagtttttttaacatttgggatattaaaaaagtcccaggtatccctgcggcaggccctnaaagggtaatntgaaatacacgttggtgaggcttcttttggtaaattcttggtgcacacagcagccatgcaagcatatataancttgtcagcattgcacttngcgtccctctngacttncannnnnnnnnnnnnncagagctcatcccgacgttggagggaacccttttttttaattattttcctatctttttatttgtttcagccgtgctgcactggaaaaggtccctggaatcgccgcaactttacaggttttttttttcctctcttctgtgcggttacactaatataataaaatgaaaagagatagagagataaaaaaacaataatatacgcaacagatcaaaagaaactagcacatcatgatgtcgctatcaggcggcatattaagctattaataatttagttttgcatacttgtgccgcttccaaacgcttctctttgttcttatcatttgagctgcgacccaatcattttaacatcaccttttcttgcactaggaaggatgccctttttctctttaccggtttg

SEQ ID NO: 50840 - DNA, 1227 bp, Oryza sativa
gcccttcagtataccgcccagtttccagccctcaagtaacaccgcctcgtgaaccgtggagtcgccgcacatgctgccggggccagtgaattctcaatgtgcctaagccagtactattttcttcttttttttctctctttttcaccttattaccctgtgcactttgccatcttttacctgaataaaacgtactactggtagtacgttgaagtagcattggttcactcttctctctcaccaaaagaatcttctgcagccacctctctgcatgagggcctgccttttccatgcacaaactctcagtggatggccctgttgcagattacctagggggtgtttgggaactagggattaaatttagtccctgggactaaagtttagctccactttagtccctccaaccaaacaccaccctagtatccaggtaagaaaaggaaatttttcttggacttggaatattgtttcagattttgaggtttgtgtgcaaaatgcctttagaatttggtttgtctagcattttctaactgtttgttacacttgttactggtctagatagttatacatatgcggatgctattgccacatgattgtacactgaatttacacacgcagatctcaacaggttggcagatgatgaattggcccttctacgccttggacatatgacttaatagttactaccaccctgacaggataaaaggccgggggaaaaaaaataaaggaacaaaagctaagggagcacaagtaggaagcaaggtggcattgtgtgggctcctcctggacatgtctgttcctaatttcctatctctccctctttttaactttctcaccatcccatgtgcaacattcagcctgcagccagaagaaagtagaagtgtagagccaagctctcccttctcatgccaattgcccaagaagctatgaagagtgtgaaaaaagatgcatgaatagtgtgtactagggaattagagtgtagatgtagctcatgtaaatctattgtcataagatagcaaacattatcaaacacgataaacttatataataaatttatcactcttcttttaagataatggatagatttatcactaaattattgcaacgtgtatgcatagtgcactatcttgacagtgtattatacggccctcctagtgtttcccttcacaaaagaaaatagtggaaatgttgcattcaaatccacaaatataatgtactcctaggtacatggca

SEQ ID NO: 50841 - DNA, 3786 bp, Oryza sativa
cccccccccccccaacacccccccactcccagacccaaccccactaggtggcccacacgcttacgccactgacatgtggggcccacatgcgcatgggcccacgtgtcatgtcagccgcgttggtggtatccgcgtgccaatggttcaggggcagaggagtataaaaatggccatgcattggcatgttgtgggttaatccctccctttccaggtaataaatggccatgtggcccttttttttaatgattaggcaaaaaatcttggtgattaaattaagttaaccaccccaattattatgccccggcttaagttaatgtatgggcaagaccgggattggcatttcgtttcacatgggagattaattttagaattgggcccaaaagggagttgaatttgagctttgctatggtcacaacagtgcatcacttctatattgtttactggtattttctccattagcctcaacagttagaaattcaaataaatattgagcctgatgtaaatgaacaagtaggtacaagaattgggaatttcaaaatggtttttccatgctcccttcgaaacaagagttcgagtaacgcctgtgatctcactgtatatttattcgtgcatatgtatctactctattcgtgataaatagggatgtgcatgtacagttaggaagtaagagttgcccatactttcaatgtgaattttcttgcaaatgcatgcatcatgtagtatatcatgcattcatatataataaaatatatagatggtgaatggtgtagtactcattaaataatgtgtacaaatgtaggtatctctacgtcatgtcttcaagcggcatttttggatttacactatcaatccatatctccatattgcctataaaaaaatactatgtctccataaaccaatgtagtagaaatttgactgacaacttcattgaattaccttcccttaattcacaatgtagaaatttacacaactatatataaatttaattctactatacacgtaaaactttgagttgttttggtaaaaaaaaatgagttgtcattgatttcactatttcttttgtagtagaattcatcattggtgtattacttcacacaacaaataaatgaaagaagttattatgtatgtaatggaaaccatgggatgcttctctggtttgaccattggtttgtatgtcggtttgtgtatgcatacgtttgtgacataactctagctagctgttgacagtaagaccaaaactatctttaaggagaagtttttgtagccgaacgtttgagcctgatacttcacggtgcaataccaacaggggaagcacttatccttttttgtgtaccttcaatcacattcttcatttttggcaccttaattctctaaggaaggggtgcaaataaaaaaaaatctttatggaaaacaagcacataactaattagacgtggtaccagctttacctatctacatgaatgcaaaatgaaacaattttacgcacacatcctataccttaattatatagatgaatacacggtaaacatggcaatatacataggaagagaggaggttaattttctgccttttagggtgggcatgatgctcatgcattgcgtgttatttatcctggtacagcatcaagtgcgtgtagcactagcaccaccaccactaagagcaggtacaatagcaggctatagccagctgcaaacgtattttgaggagataaatgaggagagagaagagcagcgggctacagatttgtagccagctgtagcacggactccaagacacggtgtgtatgacaggtgggaccaggtattaatagtgtagtatgtaactattttatgaataagctattagattggctatagataaattagagctagcagttagctatactattaaacttgctcaaaggctaagaaaaacgctgaagtttagggtgagagaaagaggaatcttcccctccaggtggcacacgatcccacctgcatcacacctcatcatctgccgggagccggaggaaggataatgattgatgatgccttgagggatgtaaaagcacaatccatccatccccaaatcaccccctttaattaactaaaactaccaaggctaatcctatcttgcacaaataaaataagtactacccagctagggcttcatagcctcttaattagcatgttaattagggcttttgttgatgagatgtttacttattcatttggctctcatctatcgtcgtcgccggccatcaggagccagcggtgacaggtgaagattggccacacgacgtcgtcgtcggcgttgaagttggtaacaactgcgtacaaaaaacctgttgtgacaggctgttccaacctccaactctccttgttggaccttttagccgccggattgttcaacaattattcatcctagacgtggtaaattataattcaattcaacgatccagtatatatgattctaatagatcgaagatatatgtgtatttacttggttataaagtaagacatgcatataagtaagggtctagtgttgtacttttgtgtgtgtgtgtgtgtgtgtgtgtgtgtatatatatatatatatataggtaaattaactggtgctacatacagtatgggctctaagattcaaattgagtatatatccaatttgaatgagtatgaatttttttaaaatgtttagatatgaacattaacttctttactaacaagttcaaacaagtttgaactgagtttgtacttttttttgttagattttggttctaggtatataacatccagacatataattcgttaggtatgtaataattaattgtgaaataaagttgagtttgagttgttttgttgttaggtatttgtatgaatcaaatttatatacctagatatctacttacaatttgtaaatttttaaaaatttaagagaatttgtgtgttttataccttggagcccgggcaccatagagtcccatatgggtatccatatatatatatatatatagtgcttttgcacctatacaaaagattagggatatgcaatagttctagggaatatttaaaaaatgtcacaagtttgttcagtaaaaaactttcaaacataactatagtgcaatcgcaatataattagattgtaactatactagaattatacaataacttttatgtacttgtagctcttgaaagaaaagaggggcacccatttataatataaaactttaaccatttatttctaaatatttatatagtttaacatcatatgaataatctattatgaaattattttccatggaaaatgtaaaatcatatatctataatattaattgaccaataatatgtgttcaaatgggatactttttctcattattgaggacaagattttactctcaaactggtggctgtaattaagctaggtcatttttcattgaactaccaacatcatgtagacacgtgccgtcaaaatcaccttatgttgggtcaaagaaaatcgacgttttcttaacctatctgggttgaactcgtagaactcatacctaactatatatgaaactcacatttacatgtagacttgtaccaaaatagttcggtctatactctatcctgataccataatatacactatcatgtatattctttatgtagcaagaaaaaaagaagtggtaggatgcatgcttagataaatttagttgctcaaaactctcatatcaccatctaatcacattttcattaatcaaatccgggccccacatttttgcaagtagaatgcccacttttcctgaccatattggcggcgtgttaa

SEQ ID NO: 50842 - DNA, 1876 bp, Oryza sativa
agattttatattcagataataaaattgtggaatgtctaaatacttttatttggttcgttcctcccccagatatcttccttttggtcatgatgcatgtcttgaagcaattaattatttatgggagcacaataagtttttagaaattttatgcgaaattttggtaaatttcattattatttttttctaccgaagctcatccgcatgttgcacaggcatggacactccttgctcccttgctatcacatttctatcacgtactccgtacgaacgttccaaaatatattatctatattaacggtcagacatgcttatatttgaaaaaattagagtagctatttttttctaatagtaaaataatggctagtctttaaatttggagtagagtactatctacatttatggattttaaaatgcacatctatgtctttaattttgatttaatgtatcactcagctcaaagtacagataacacaaacttagaaactaatttggccatccagtggaaattttacattcagcccctccagtacaatattcccctcccaaatcaactcccaccatgccagtgggagaggaggcgaagaaatggtaacgaggatagctgcgactgtcattggtggatagtccctagaaccgagaaaaaccacgtcacatagagagggttaatattgtaagttcagtgtggtgttattttcgccgtaatcctcgtgcaatatgatgttccattgtttgccttcacggcgacgatcacacgtgcatggctcgtgggacataattcctaattggcgcatatgcgtcgccgacgtgtacttccggcccacaagacccacgcgtatgcgcggcaccgcgcgtcggcgcggttagatttttttcgggattttttccatagcgcgtctagtaactaatccgttagttttagcatgtaaaaaaatccattagttttagataatgaagataagatttttttttaagtaacagattgaaaagaaatttatgcgtgaagtcaaattcgtgaaaactttcaacacaaatttgaaaactttcaacccaaatttgaaaactttcaacttgaaatttgaatttttaaaagtcaaattttgaaaactttcaacttttcatctcaaatttgataaacttcagcccaaatttgaaaactttcaagtcaaatttaaaaactttcaacccagatttgaaaactttcaagtcaaatttaaaactttcagacccaaatttgaaaactttcaacctagatttgaaaactttcaagtcaaatttaaaaactttcaactcaaaaatttgaaaacattcaactcgaatataaaaactttcaacccacaaaattgaaaactttcaagtcaaaattaaatactttcaactctacatttgtaaagaggtgtctgaagaattaaaaaacaatagaaagaaaccaaaaaaaggaaaaacgtgcccggatctgggcactaaaatcgtaaaaaggaatgtgagaaagaaaagcacgctgaaaccggggagggggccaactgccgtgtgcgccagctaaatttgctggcgcgtacgcgcattagccttcccccctcgtgggatcaccctttcactatggtgccatcttacctcggttttcggggacctcctatctccgacaatagatgccactctaatcgtcatctcttcgccacctctcccacatgtgtgttaggagtcaacttgggagtgatgaaagccggattttgggacatattgtattgaataggtgtaaatacaaaattctcgttattgtggacaaccatgtcagcacccgagctacattgtttgtactttatacatctcgtgatacattaaaccaagattttagtccttatattttataagtgcatga

SEQ ID NO: 50843 - DNA, 5101 bp, Oryza sativa
ctccctccatccacaaaaggtatacctattacttttgtcatcaagaccaaggagaaattaaatcatcttggatgttacaaattcaacgagtgaatgaaagcatgcaaccaatgagtatttatatgactccttgggttctaatcaaacatttaatttatctctttatttaagtcttgaatgcataaagactacaaataggaataacttatttggaaaaactcaaatgtgaaatatttctaacttttgtggatggagggagtattttaaagagatttcttatatgattcttttttatttctaaaaacaaatgaatttaaaatccgacttaaatacggatctgtatttttaaaagcgaacgaactttaaaacgaactcaaatacggatgaggtaacaaaataccggtaacaatatatttagtttttataatactagagtaaaaagcacttagttaaccgaatctccttatttggaatggccaaggtctagcacttccactgattacccactatctggcttaagctactctccccaggagctagtacgagtggcccaggaagccgcaggtctaggcatgcaccactgtggccagcagcatgacgtaccacgtccatctccgcccgcaccgcagtgctcctgccggcttttgcagctttccctccgaccacccacacacccacaccacacctttcatccggcggcgcgcgcatctcgcgcctgcaaaagccggcagtgattagttcgtgtcctaaaactttttaaatatacatacacacgtttaaagtattaaacatagactaataataaaacaaattataaatttcacctgtaaactgcgagacgaatttattaagtttaattaattcgtcattagtaaatatttactgtagcatcacattatcaaatcatgttgcaattaggctcaaaagattcgtctcgtaatttacatgcaaactttctaattggtttttttttctatccatatttaatactctatgtatatatttaaatatttgatgtgatgaaatttttgggagtttgaatggaactgaacactgagtaaccatagccacccaatcacccaccccgcggcggcgcacggtgcacgcactcgaacgcggccgcgcgcatcgaccaaccacaccacaccaccaccaaaccgcctcggggacttcggctacgtacagctacctctttccaattggcaacgtgacagaggatttcacatcaaaccagaggagagagggacaccgaagaattaatcacaaattctattcgctcgggggattggggattggtttattagcccgcagcgtcctaccagcacgcactagggcgctcatgccggcctgccagccgcgcagctaccgaggctcttggttccatggaacagggaactacccttttgtgtacatatgcaaagtatgttatctccttccctgtcattttgttaagtagcaacttgtccgggggcaataatatgcgcggtgggctgcagcttagtgtattacaaatggcaacatacgtcgtactattatacgttgctgtctacaggcgctactagtacaaaaatcagagtcgggtcgctgcttggtctactgcgtgtgcatcccaatgcccgtgagagtgagagatgtttatatgtatgcttgctaactagttgctttcccgtcaaagaatgagagatgtttatgctgaggaagcaactggagtatacacagatgtggtgctgcatctgctcactttcgcaacgaaactttttgactcccgtagtttgagtttgcaacgtgcagcaccggatgataccgaccgatatatcgatctcgtttatcggatgttgagattcccaacctgtttctagcagggtttcccaaaacaccgggggtcagggttaccgcgccctggcggtaagcacagttaccccgataaccgtgacaaaccgtacgaaaccatgtaaaatttattaaaaatttaaattattttaaaattttatttgaatttaaggaggttatcgcagtttttttattaccgtacccccacgttaagaccgataaccgcgcggttaccgatggtaatgtaaaccctgctggcgtacatatcatctcgttagcttctggcaacaagataccgatcgatacatcgatctcgtgtatcatttcatttcatttcacacgagtgcgtgcattttagggttgaaaaaaaaagagagcagagtatacgaccagcgataaatcaactgtgaggctgaccgagattggtcgatgtgatgaaccaagtagtccagacttgaaataaactagctgtggatccccgttgagttttgaccggatacgcatgcaatgcgtgcatatccggcggcaagttgcagcgtgatttcgtctcgccttttccgcgagccgccagctgccgatcgagcgaagcgtgtcggctaacgaaacggcggctcgatcgatcgactagcttcatgtgttgcgtgcgagggctcacgcgcacgcggcgcgtgggctcgttcgatcgatcgatcgggcgcggggcgccgtctcccgcgacgcaaccacacgcaaacgccgcgcgcatgcgtgcatacgtgcgggtgagagggaaaatttgcccatgcggcacacgcgcgcgcgcgggcgggcgggcgggcggccgcggctgctcccacacttgcgcgcggatgcggaccgagcgatggctcggtgttttttttttcttccaggctttgcgctcggttagagcaagtttaatagtgtagccaactaccggctacttcctccgttttacaatgtaaatcattttagcattttctacattcatattaatgttaatgaatataaatagatatatatgtctagattcatttaacatcaatatgaatatagaaaatgctagaatgatttacattatgaaacggagggattataaattatctatagtcaatttagtagccaattcatacaatagttacatactatactattaatacctggttccacctgtcatatacacattgtgtctaggagtccgtgctacagctggctacaaatctatagcccactgctcttctctctactcttttatctcctttaaatatgtttatagctagcttatagcctgctattgtacctgctcttagtttgccttattaccggggacaatcgggggagagggaatagggttcacgatcctgatactggataaaaaccgctcacgaggtgtatctttggaattcaccaaagacattgataaaaatgaaaaagagatgaaatcgataattttttgtcgaaaatttatagtccagcttgaattttttgaatttaacatgaaaaagcgatttttgtttttttacctcgttagagaagtctggattatgtgaaatccagatcggttttcatcaagaatgcaaatccttaccctagccaaattaagataagcacgggtacagtgaatatagtatgaaaacaatatgtaaaattatactccaactcagtagtaccagtatgtgcccggtatacgtataccacagtaacgacggtaagaaaaaagctacgaagtacttgcactgtagcgcgcgcgtctcactcgaccgatcgctattcatttcgatgaaaaggtcggcttttggatgtgtttcggggatggtgtgtgcacgtatttacgtacatgcatggtggtcagagggaatggttagatttttcggcggtcaaatttggggtggtttgacggctagctacagtaatcggttaatttgaccactgctgaccctttcgtccgtacgctgtccacttgttagcaacagttatactcccagttttctaacgttgtttcactttcatccgtcgcacccatgctaaaaaacaaagttgatgttttgttctgcattttgtagtccgatatatcataaatttgactagtgaaatgtttactgatattatttactaattaagttgtatgcaacaataagttcatccaaagcttttctcacaaaaaaaaatgaaactcacccaaaagttcaaccaaaccagagaagtcgaaccattcacatcacatgcatattaaaacccaaccccataatgtgccacttttcaccattttcttatataaaaaagtaatttcacaaagttatagatatattgaccaaattagcacaaaattatagattaaagatgatatatcagaaaactataggtttaacacaaaatatattacaaaattacagatttaaagtagagtatcataaaactacagaatgtaccagtatcattctcattaaattaatgcttgaaatttatagatatttttatttgtgattaaaaagttttttttcttaaaagtgctatctaaagaatataccggaacattgagaatgatatatatctttatagtgtgtgcatccacgagtattacttctttgaccaatggcacaaaagtgtagaaactagagaagtaataattgaattggtcacgtcggactaattttggtagcatttaccaccagcagtacttcaactctcatgtcactgttcaaactcgtgcgccgtatcaacaaccggacacaaacctcattctagaaataacggtgaaattaaaccaaacacgtctagttaaaggttgttagaacaggtgattgattaaaatggcctcccatcttttgaagtcaaatatactgctcaaccccggcccataaattgacagtgatcataccactgcagctgctgcacatggaaaaggccatccattgatacgcgtaattaacaaagaaagaattggtcttttactactacttctaattgtccttatctgaaaaaaaatataccactgctaattgtaattgggttttatggcatgcagctgtcaattaatcaagtagtagtaacacaagcgagccgacatgccgtcagctagcgaccgctgtgaaaaggtgaatgaaccgaacgaacggctcgtgcatgaacaggttgaacgcctcagttttttttctctttttcaatgacgttttgactaggttttctggccggtgtgattgccaatttgacctggccttttcattgccatttcaagccattccctctccttgtcactctgtcctgttcgaattca

SEQ ID NO: 50844 - DNA, 2019 bp, Oryza sativa
tgtcctgttcgaattcagtacattttttagactcgcacttcctgtacatgctccccttttcttgttttgaatctctgtacatgcaaattgtactccactatttgaaaactaagcgtgtggtccagttgatccttctggatgaatcgaggacaaaaggccaaaattgagatcgcaaatactactaggaagtaattccatcgtttacaagaagtatcctagactaagggggtgtttggaaactagggactaaactttagtccctctcacaaaagtatagggactaaagtttagctcctctctcccaaacaccccctaaatactcgtagtgtggtatatatcatagttaagagatatatcactcgtatgtctactagccgaaaagtaagggctggtttggtttgagacctaaattaggcttaccaatatttgataatttcaatagtgtttagtgtctatttggtttgaagctaaattttgacatgcctaagaaaatatgtcatttcaataatgaacttaggctattttagcttcaatccaaacacaactttgccttaataaaattagtcatgccaaaacttactaaaatttgcactgacaaaatttggtaatgtctatttgaccacaaaccaaaccaaccctaaaacttccaatttaaaaaaccgtggttaaatcttattaaacattagtgcatgttttaattgacccttcttgataaatcgaggacgaatccgaaaatgagctcgtaattaagtaagaagcacaagaagcacctccgcccaaattaaacgttatggtatcaaattatcacggtcataagatctcgcatgcacgtctgccagtgtgaaaggaaacacctccaatttccgcaacaatagttaaacctaaatacaaaagattctgcacgcatacacgacttgccggtggaaaaggaacacacccaatttccgcaaccatggttaaacctaaataaaaggattcctcacgcaagcttgcaagtggaaaagcaaatacccctattttttgcaaccatggttaaatctaaacaaaacaagtttacaaggttaaccaaggtgaaggtgtaacctagagtcacagtcaccctctccatctctctctcctttttgagcccccagcacagcaatgatgccaccgggagacgagcaaaagaactaaactcaaggggatttcactgtcaaagtgtcaaagcacacggcagtgtcagcactgttaagtgcccagctttgcctaactgtctcctcacgcacacatgtggctctcccctcgccaagtcgcacgcgcgcgcgcgcggcttccttccacgccgcgcgcggaagtgctcggcgtttccgttccccgtcaggttgcagccatgcacgagaaagggacgcccgcggccgagctattggctgtttgctttctctcgttgtcacgacctgcttgaaacagattatccactgaattatgatagtaaataattaaatattttaataactgataacttaggataagtgatgttgtgcagtaaaaggattattcttttcttttagaaaaaaaggaatttttagagaaattagatgaatagcctgcgtcccaatagtgaattatctatatacaattataagttgcgatttctcccgttttcacgaccaaaactacaacagattattgaccaaattattatagcagattaactatacaattataaatataaattaaatatagtaagcggataacttataacaagcgatatgatataaacaattaaaaatgttctctatttttttagaagatgagtttttagagacgtgaaatgagtaacccgtaacaataactgtgaagtagccgaaaagaacggggtcgtggaggcgagacagagaggtgatgaaggggatggagagacgcacgcaggccacagggagggacagatcagagaagaggagaattacagatgctgactcttgacagtagtgacttggctggcacctggttacagagacgcgtccatgcaaacggctggtg

SEQ ID NO: 50845 - DNA, 1926 bp, Oryza sativa
tattaaagtgccattagtaagggcacggccacatctgcatatattcagcttcggcgccggcggcctcacgtaaccatcagtgtccgtagtggccgcagctttcagcacccaaaaaaaaaattcagatatctgcaacctcgtcagtgtcagaattcagacacggctctgcaggctttgcagtagtacggttcagagataggatcagtaccgggagaaatccactgcgtgaaatatctcggttcttcacgtaatctggagtgaggaattccagtcaatttactgcttccagtgcgagtatatggttttttttttttagaaaaaactagtagagtactgtacggagtatgttttttcagctttcaggagtcaaagatgaacagcggatgagatgttggtgattgctactgataacgaataaaatgactcgtggtaattaagtggtagtagtacagaaggactcgtaaaataaggatggggattaggtgaagatgggtaggtagttttaactccaagcttttgatgcacattttggattggtttgtattacacgcaagcaaactctgcacaattattggctaaaccactctgctgaatccgtgtttctgaaattacacgtactgtagcacactgacattctggaggagtataggagtatctctgtgtgatctgatgattgatgtacgtaatgggtcagtgagaggtggatgaagctgaggaaataaatggcatcagcgtgtaagtacacggcaattagttaggagatgtgaaaagggcagcagaagtggatgaatttgcagaaggtacaaatagtcagatgccaccttctgatgagcagttgagcacacaagatcaataattgggtttttacccaatgggagaagcaaacagagttgcagacggacacggccacactaggcagctcatctgacgtgtaattttggcctcttaacagagagcatcatcgaggtcttggagagttgaacacttggacgtttcgacgttaagctcaaagctcacttatgagaaacagagaaagagctttctacgtaattttgacctcttttctacgccaaattgggggcagagagatagagagctcgtgccatgggagaaattttgcagtcggttttctgaacttagtcaacttatcctgtgatctgtgaacgaatgatcaaagtgacaagtggctggtttagttattgagaaacatttttcattcccatagtttcgcctacagcagattttaaaccgtaaggtttattatatatagtataagtaaagcgttttatatatgtttttagtgatttaaaagctctaaactaaaaataaacaacgacgaaaaaaattgaaaatcaacccttaaattaagtctgataattttaaattttaattacggctgataagctgaagagcaaaacggtgaagttgtttggaataggtccacgtacgtgccaccgcagctcggcgactcccatgctcggcgtagctttgcttacggcggcgcgtgccagccatgcaccgggcgggatgacgcgaaaacgaaggcaatttgcatgcgcttttcctttgcggcacgcatcgtctctttgttcatcctcacacacacgcacgcacgctgcctgccagcgatatgatgttagttccaaccgcctagccttcacacaaaacatgtttcagatagcgtgcaaccgaactgctcgccttactgcacagttggtctcacctttcccacaattcccactgtactgttttgtatatcggttgcaaaatgttgggatcgatgagatggaatgatggatcgcatttcgcagaaagaaaaattagaaatggattagtagaaggcaaaaggactcctttctagaggttagatcatgcatgcaggtaggcttttcttaaatcctggtaataattgagcaatttcattag

SEQ ID NO: 50846 - DNA, 732 bp, Oryza sativa
attaggaaaaatgaagctcaaggcagtttatgactagacacaacagttttttttccttcaaataactaaaatggcaaatgcaacttaaattttcagagctttctgcaaaaagatcctcgtaactggaacataatagttgacaaccatgtcagtcaatgattattttctcataagatgtatgcaagacgtagaaaactggattcatcgtgcgaagcaactaggtattttcgctcatcgactcagccattagaccacaattaattttgaatcgtacgcctgtgtgctaacttatttttaacaacaaaaaaaatctctctccaatcagcaggcatatttttttccctgtcatttttcaactgtttgtatatctgcatatccttctgaattcctttttgtatattagcaatgatttgattgctctgatgcctaaacaaagttagaaactatatcctttaataacaaaatggtacatgacaagaagaaagtatcaaattttgatcaattaatcataatactgacggtcagaaactttgtaatgctcatttctactaatgaaaataggggggggggagggggggttatgatctcctagaagggtcctcttgcatccatatcaaaagacaacaccatgataagcatacatagcacatggaattaatttgcaactcaaagtaggtatggacaagcatgatgccattttttatgtaataagtaaggtccatatttatgtct

SEQ ID NO: 50847 - DNA, 565 bp, Oryza sativa
aaacaacttgttttcaggtaccatgtggttgtgctgtttttataacaataataagtgccgggacagctgcaggtttcaagatggaagtggtcaaaactacacatgctggtcatgcaaaatctcttgtatcaacaatagatttcagtacctgtccagatggtatatatatctttacatcttacctgaagtgttctacataactattttgatcatctgattcatgtttgtgcctgtcttctaggaattgtatgtgtgggtggcgatgggattgttaatgaggttagtctatgttaatttcatgcatgatttttttatgtttcctcatcttatttttaatgtgtttggtataccaactagagaaggtaatcttttatgacaacattaccaattacagtttcttaaattgccttagctcttctgaagttttgatctgttatatcaagaacaaataggatatacctatataaactgctgaaaattgcttgaagtttcgcaactttgttctgaaaccaaccttctacttcctcagcctgaactgtttcagggggaaactactaagttcaag

SEQ ID NO: 50848 - DNA, 2815 bp, Oryza sativa
  unsure (1)..(2815): unsure at all n locations
gcagagatcatcacatcacacatgtccaacaacaccatctcccggcctctcatctctttcgatcatggcggcaatgatggattcgccatggataaggtgaggtccagagcatgtgagctaatgcacaatcttatcctcctccatggtagaccaatggcaaatggcactatctcttcgatcttgttgttcttggagaaattaattaatatatagaatggttaatcgctttgagtgcattgcaactaacagagcagtagcacgttaaccctgcaactaggtaccaattatgctctgcgaaatgcaaggtcttattggcctctcgatcaatcaacatgtatctactactactactaccacctactgccagcttggctgcttgcattgctgatagatcactcgattaccggttaacaacgatgattaaaccaagccacatacgcaatctctgagaatgactgttccaaagtaacactgtgcatttgcatgtgggagattgctagagtaattggcaatgctgataataacattcttgatataaatatatttgaaagtaccgtttgatgggttgacctatcgatggaagtgaccaagtatgtcgaggatgtccctcatgctgctggatatgaccacagcattgccccaatgacaagtgtttggcatgtgccatgcttcctctaattaaactccattatggatcaacgcagaattgatgtttctgcatgttaggatgaataattataggttggttgatgatcacagcagcaatgcagttgggttgttcatgcaattcccccttttagctcaccagctaggaaccctttattctctcctgaactgttcattcccatggatggaattttaaaaaaaaaaatttaattttttaaaatctatatattacctcaaatggatcatgggtgatcatgggaatcattcactaagtatgcatgcaacnctnttnntactnnnnnnnnnnnntcttttggtncagaggcaggangggnnnnnnnacctcatgctaacatttagcatgggcttgtgtactttggatgacacaaacttatattgttaaacttccatctaaaaaatggctgtgaatgacgtctggtagtaggtggatgtgacataattacatatagtttttagttagtagttgaataattggattaacaaatgcccctcctcaagtgcatgcaaaaggtatcctactttctgattcattgttgcattgcattgcaccccgtgaagaagtagctactacaatctggactacttgatgtttggttcttgcagctttttcttgaacaacctgtacttagttcagttgatatatatcagcatgcaaagtttattattgttcagtgctacttgcaagtacatatctctaatatatactaacaattacttatatgaatcattcgaatgctagcaagatatgattctctcaaggtatgcattgctgcaggagcagatgaagaagagatttttcactcactctttacattgcaaaggacaggcatctttttctggctccaataatcagatgtagcagcagctattagcaatgaaacctacagttgatccatcgatcacctgatcatgtaactgacggatgcatctgcaatgccaacttaatcagttaattggtggtctcaggtcgacatgcatgtgatgtgctcctgtttagggtatcaaaaattaaggccataatcgtaagcaaggtgtaaagttgatcacattctcttcatgctaaggaaaggcgatccttgctatccacataaaaaatctcaccttccttggaaagacatcctgttcaaaaattctttatttgtcactgcttactaattgtgctaagaaagaagtcaatgcgaatttgtgagagaatttcgttgaaatgcacgagggattaaacaattcacaccacttgctggcttgctgcaaacgcaagaattgtaacatttcgaactggatataatgcatttgcattaacgggaatcgtcgcactggatatgagcagagagctcgtggctttgaattattgagagagatgaagagaggatttcttggcgagctaagctaaggagagcgcgcatgatccaaccaaacattccagccaagcagctcaagtcttttcttttcttttctgattccaaacaagagaagagaatgccttttactttagcatccacttgagttgtcgcgctccatgctctatctcatactactactcttccatccaactctacctagctagcttagctagctcttatcttgctactgtctcaactgctgcacaaataattcttcagtaaccaaccatttttttttatcgctgccattttgccgccatcctttcttcaggatcgcagcattttgctgtcattatttcttcgggattgaagttccatctacatgaaagatgagttgcaaatagtgtgatgatcaattatcagttgcacagctcatctggttggatttttttgttgattgttcagagtttcagcatttgagacatggtccatgatctgccgacatcacgtgaaacgagtgatttttttttaccacctgcaactgaggtaacatttgggagatgtaaagggccagatagattttgaccgaccaatctcgtcttaacatatagtactacattttttttactgcgattagatctgaaattattttactgcacctggtaaccacgcacagtaaaagcttcattttgactcagaacagtctgccatcccaaatctacagccgttgacagttaactgaactttcactagttcaatcactcaacttataaaactgccgtcagata

SEQ ID NO: 50849 - DNA, 503 bp, Oryza sativa
gcaccgccaccaccaatcaatcatgaacacgacagattaattagagtttaaatacttaaaactataggcatctttgagcgatgtgatgtgactcaaatttatttgctcaagacgagagcgtgaagcaagcaagaagcttcacgagtcattcagaagaagaaaaaaatcgaactttttaaggcagaaaaagatgtgtgcaacaggagctactagctagaggagtactagagaatcaatcagacaagaacaatcttcctaaaccgtgcgtgcggctactaaatatataatttagagacaataaatatgccatgtcttttgcttgccgtaccaccaattcaatcgtttggtgcaatggatatatggatattcagaggggaaaaataataattttgggggagttttgcagtgtgcttgaaagctacgtgcgaggagcgaatgagcaaaatggacatcagaactgacaagactgtgttcatctaacttccaagctcaacagcttcgca

SEQ ID NO: 50850 - DNA, 670 bp, Oryza sativa
agtctacgtttaatatttataattagtgtccaaacattcgatgtgatagggacttaaaagttttagtcccatctaaacagggtcttattcttttaacggtagacgacacatccatcatcagcgaaacacccatgataactccgtcaatcataatatatgctggatcagtttttcataagtattcataggtgtagagtgtgcgtgtgtatgtttacatgggtaagtgtgcgtgtgttgtgaacctctgtttataccgtgtttttttttaaaaaaaatgaaaattcgaatgtggcttgttggtattacaaccgcaggtgagtgagaccacccaccggttcgtgtctccgcaccgcccatccctaaaacatcgccacgtccccgccaccccccttcaatgtccgtcgccaccggcggcggcgtcgtcctctcgcgtgcccaatgcgcaagccccaccacgccgcgcagcctccgccgccgccgccgctcccgctcccgctcccgctcccgccgcggaactgcccgctcgcgaccgcggtcctggcgctcctctccgtgctcctcgccacggcgctgtgggtcctcctcgtgctgtccccggcgtcccacgcgaggggcccagccgcggggctgtcggatgcggcggacccggaggcgtttgcggtggcgggcg

SEQ ID NO: 50851 - DNA, 1120 bp, Oryza sativa
caagtcaagctatcctgcttttgcacgagcgtgtagtgttgtgcatagacgacggaaggggataaacgcctgtgatttagccgacaaatcccatttaggacagatgaccaaagctaaactatgctggttgctgccttacaaggaacatccctcctgcctcctgattcctgcacacactgcccggcatctctctctgtctgggtcaacgtacaaatcgttctagttttctactactatatattgtatactactagtatatttgatcaggtaagtgctagagaactgtgtatagctagcacaaaaatgtattataattaggattggtttaatctgtaaatgtgttgcactccaaccaagcacaagtccccatcagaagtttcagagccattagacaaagggttgcaccacactctgagctgcctgcacgtagcttcgtttctgtacttctctatttggatgccaaaccaagacgcttgtcccagttagtaggttcaagcaacaagaacagaaaatagtacatctcttctacgattaatattattcagagtttcggacacataaactggagctaatcagctaatcgcagcagcgtgcaaataatagagagaatctcttatatgccactagaatttaaccagttcccttatatgccatttaaaattggcttctctcttatatgccactagttcaagtttttccacccttttatgccactcccaccactatagtgttagttgactgttagtcaaaggttagttttttcataaatgaccaatatgccctctcaactaaaaaatgtgtaaacttcaaaaaaatcataactaatttattttaaatcctttttggatgaacaaaattttatcagaaccagtgaaaaatgctctttatattaaaaatattgttggaaaactgcatgtttcatgcttacattgaaaatttatttgtgatggtaatggctaaaattgcatgtgatgcataaaaaatcaattttcatatgttgtatccagtatagctatattagtactaaaatacctattattaagggcaaatgagtctttttacaataagttaacggtcaactgacggtggactgacggtatggcataaaagggaagagaaa

SEQ ID NO: 50852 - DNA, 618 bp, Oryza sativa
aacggtcaaacgttagacataaatagtgtaaaactgcatttattttgggacggagggagtataacgaatctaaactggagcagatttattatactaaattatgtcatattttattttaggttaggtttttcagtgacggcagagtgccaagagaagaaaatactagcagaggcagagacgatcagacgaatggctggcctctctacccacacccatgccaaggcatgaggatgatgttgtccttgtccacagtgcacagacactggtgcaccgtgatgcacagtcgcacacaggcacacagccttcttcacgaagccatatccctcattcccctctatatataagccagcaagctgcgccatgtcatatcccccgctaaactctccgcccgcgcagccttgcactcgcgtcgcacatatcgacccatccatccggcacgcatgcaggcgcagcaggccatggacgagcccgccaacgcgcagctgtacggccacgctcacgcgcactcgcaccaccaccggagcaagcgcccgtcgcccggtggcggcggcggcggcgcggcgactctgggcgcggacggtggcggtggcggcggctctctcagcgggacgcggtacc

SEQ ID NO: 50853 - DNA, 550 bp, Oryza sativa
tgacgggctttcacccgtcaaaggtgaggtgtagtcatcagtgaccacttgtctctgaccagaaccaaatccgtcaaaggtgagggttagagtccgtcacagatgactggatccggcctagtgtctaacatttaaattttattctaaaatatctaatttatttcaccattactcctatctcaatcaatcacaaccaactttcatttaatttctcaacttcatctcaaattgagattcagcgcggttgcacaaaagcaactgcatgcaattacaaccattcaagacctaacacagacgcaaacaattgctacaacaggatattcacaatggcactctttgctactattgaccatatgtgttgctactatgactgcagtcataatagggatggcaaacgggcgcgacgggcacgggtagtgcctacctatacccgtgcggccgtgcccgtgatattatttgtacccgtgggtatgcccgttactacatgacgggcaatgattgttgcccatgcctatcgtccgcgtgcgccttgtgcccgcgggcgtgcccg

SEQ ID NO: 50854 - DNA, 1681 bp, Oryza sativa
cctcctcaaggatcgtaaaattgctcatattagattgtgcaaaaaaatagttgatcaattaatctctaaagcatcatcctttcacttatgcttatataagccaaactttaaaatttaaaacttagttttaaagttgattttgttggtttttcatcatagtttattttacagcacatgcttttaaatctctaaggacagtatgtataaaaattttatccacattatttttcaatggctgataagcaatacggataaacacgaagtataagcgaaacaatggggccgctagtctctaatgaatatgatgataactgtacacttgtaaattttacaaaaattctttcaacacagttcacctgaagactatatttatattgaaaattttcaagcgtctatgtatcattttgtcaacaatatttggtgactaattatcatcactatgatagaaaaagaatatatccaaaatatactgcaaacaaagtcaaccacataggagaaaaaaaagagaacaataatgttgcatttttgtagaatatcttattagatgacacaaactcatgatctccaggacaatgaaatggcatgcatatgccttgatcaggctgctagcttgtctggatcacagtattaaacagataactaaatgaacatgatgaatcatcaaacaaatgcatagtctttttcaatatttattatcttactcctatatacatagaacatgcaccacattttatatagtagtacatggaacactctatcttcagtgctatatgtcgggtttgctatcctggtttgtttttgactttacatagtagcttttatcggtgtgctggttaggtacatgtgtgaagagggacatcaggaagcaaaagagaagagaaaattgaaaatgcttccaattttgtggcaggtagtacaaatgttttatcaagaaaatataccgcctgcaaaaaaaaaaaatcttcggaaggaacccaaagtgaatgatttaagatcacgcaatactcatttcattctgttggttggctaattagttatagatgctttgtgccttcgttgacacactcatatgccaatcaagcaaataaacaagtttatttccaagtccaaataggaatgcacacatataggaaatttagcattcggccggtggtcttcacgttagatgatgccattcaattaaccagggacgacctttcaaatagagtcatcgcctcattggtgtagttacgtaccctttgcatgtttctagttacacactcagtaatccgtttttaacgaaaaggccggatttcacacccaatcgattgaactatttttattaatgccacacaatgtctgaaaatgacacccattgattgtgttgttagtagcactgtggactaaaataagatataaacagtcatgtcccgtgagtacgtaccatccgcttaattgccgtgaatagtggttaaatgtatacaaaactctatcatgtttgcacaggatatgattaatcaaccaaccacattttcttgttaggttatataggggcatgtcattgactaattaagatgtgttaaagtaatcaccaaaacagcatttgatatagtaggtgtggcggtatattaatcctttttgtcttcattaaaatttgatggactttatacaaaaccaaatttgacaactagataggtagaac

SEQ ID NO: 50855 - DNA, 1422 bp, Oryza sativa
ggcagcggcggtggggggacggggacggcggcggcgggggacgggcgcgcgttgatgccttcagccgcgtcgcatggatgagaatcgcatctgtggagaaggagtatcccgttgggggatggtatctcgtccctagcattttcgtttcttttagataatggatcaaaccagcctctacgtaccatccatcttgagattacagttagttattagctgccatttgatttgaagcgtgcacgtatataaatagctgcatctttgttgatggagtttgtttaattagaggcgcggctgcaacccgacgacgggcacacgacgggcgctggtgacatgccgtttccggcgcgtgtgggagagggagagggagagggagaggaattaaccgctcacatgtagagttcacgtgggttccactcaccatgtaagtcaaaaccggtaactatactatcgaaggatcaaagttaaattaacacgatactgtaagttgaggaatgaactatacatgtatttcggttcagggatgaatttcagactcaacgacaaattgaaggacctaaaatgaacttatttatatttgtcttggctttggtttgggttggacaaactacagagtcgtgagaaacagcccaatcctcaagtccataacaagagagagtggattttaaacttatttctatttgtcttggctatggtttgatgtttgtttcaaacatgaacaaaattaaaaaataataataaaaattactaacatgtgatatatcactctacaaacatgcaagttaaaacttaacttctacaagttgcaaaaaaattaattaaactaccattacttaatgtatattcacattcaaatttattttttttacaacatgtagaacttaaattttatattgtatgtttgtgagatgatctatcccatattaatctatcttgttaaacttttttaaaaaaatttataactatttaagtgacatgtaaataatgatagtacatctcctcgagaatttagaattgttttcccataacgacgattcagccatgcaaactttgcaccgtgtgtgtagcagcgtaggggtgataatgtgcttaacttttaaccgtagaaaattccagtgctgaatctatagcaggttaaattttgatatcttgttaccaaaaaataaaggaaaaaatacaaattacacccctaaacaattgtgacggtatgaattatcccccttaactataaaaccgtgcatttgtcacctcaaactatagaaactggacaaattacccctttgacttaatccggaggggttttgctcctatgtggcagacacgtggcgccaacgtggcaatataatcagaaaaaaagtaataaaaaactatgggcccacttgtcatatagtactcctattcaacccatctctctcttttctctct

SEQ ID NO: 50856 - DNA, 1509 bp, Oryza sativa
agaaaaatcaggcttcctgacactccccaacatgcaagattgtatcaagctagtttgtttctcttttatttctcctaactttaaatattttttttccaaactacttatccgatctacgatacggtaccattgtattgattgtaattaaatctttatagcaagatatcacgtgattatattctcatacctgataacgatatgtttcaagatgtgtcttctgtatgtttcacaaaattcacataaactctatctcctctctctccacttcattcatgcatgcatttaactatcttcaaaatgatttttcttctaaactacttatccgatctacgatccgatcacaccattgtatttgttgcaattaaatattacaacaagacattacatgactatattctgatgaaaaacatacgtttcaatccgttaacacttgatgcctcatatgcgataacgacatgtttcagtgtgtattttcattgtgtttcgcaaaatttttaaaatgtttcgatgctttaaaaatacttatatctgcagagaaaatgctaacctttagaaatttttatattcgtagacggagagaacatgaaattcctatcttcaaaggatctctttggatttccatcaggctccaggagcacagctacacatcgatacgaccgaggtaaactaaattccgtcagtccgtctccccccaccaaacgccggtcaaccccacgaacgcaaatcaacgacatactgccgaagccagccaagcgcccaagacaatctcgattgattcgtcaaaaaaaatcacaatgtaccacaacacctgggtgtgacacacacctccaggtggagccaagcagttggccaggcaataatgttttatatgaaatacttactactcccgtacgtagaacaaaatggactgtactaccgttcaggagtctgcatcgcatgcatgtcacgtgttgtagtacttgtactccatccgtccccaaaaaaaaaggcaaaccctatgtttccgtgtccaattttgattgtccatcttatatgaattttttttataattcgtattttcattgttgttagatgataaaacatgattaatattttatacgtgacttgtcttttttaatttttttcatatttttttcaaataagacagacggtcaaacgttgggcacggaaattagggtctttttttgggatggcacactacagttgcacccgtagaacaaaatggactgttcccagatggaagcttcccggccttgaccattgttccatcgttcaaaaacccatgacatcattacgccgacgtatgcaagatcaaccaaccgggacaaggattttctacttttccacacctagtgtcatagcatagcaccatgtgactcaataattatataaaaaataaaaagtatagtaacatcaattataatgatataagtctatacacaaacgtgcaagactatattttatatagagtaaagtgtacggatggtccttaaatttgtagtggtgtgt

SEQ ID NO: 50857 - DNA, 1292 bp, Oryza sativa
aaaaagtcaacggtgtcaaacatttcgaaacggaggagtacgttgtgagtttttcgctcagtcagattaccttgatgatcctggcatcgtctactctgcagcgttggtgtgtaaaataatgaatggtggaaactggaaagtaactcctctggcattgccggccatctgcacggcgcccccgtgtctcctgctacgcatacgatcggcccgtgcgagccttagccgtaactaattgggccgtttctcgcgaatcgcgggaagtttgcccagcccaagccttaggcgagacaatccagcccagcgtgaggtctcggcctgctgctttaattggaaaaagtatacctgagaccccttatcttgtcgacgatttatttataaaatcatccatgaaccaaaaaccatatatatgacatcagtcaacttataaaactaaatcactctaagtccataggcggttttgtttgacatgacaactgaatcagtgtggaacccacatgggcccacaggtcagtggctacttccccttctctctcccccagtcatccccttctttggcgatagttgatgggcagaagggctgacgcggcgggcgcgaccgatggccggcggggaagagcacagctggcgaagggtagggagaaccggggacagatcgatctgtgccgccgttgccctcatgtccgatcacaaccaaacggagattgctgtgcaggtgtcactaatggttgtgtttagggaggatgatgtggggaggacatggcgggcatggctcggctattccgaagggaggcgatgctggtacggtgctgtggctagcgttattagtagatgttgagaggtgaggggcaacggtgatatgacgagacgatgaaggtccacgaaggtcgccgggagaaatttttcccgagcttgggatgacgcgagtggtggaacatgtttcatgccgagccgccgggaaagaggaatgggagggtttcctatggggttgatgcgagctcatgctgaaggagacacaaagatatggacgacttgccttcttaccggggagatgatgagaggggcgagaggattcgagagagcgtgagatgggaggaggaagaagagcacagggaagaaaggggaaggtactgacaggagcaggacgtcgtcgcgcgtctccggttcttcccacccgtcgtcggccgtgctcctgcctcaccggccgccgaccatgcccctcatgcctgcccttctccacgtggcccgtgcccaagaaggagagtactagaggagagagagaagagaaagtagtt

SEQ ID NO: 50858 - DNA, 1895 bp, Oryza sativa
ccaccacctattaggtgtaatgggagtaaatcttcgatcggtgtggggtattttaaatatatttattagaatttgaatacagatttcactcacccatgttagcggtttgaaacctgcacgtggagtaggatggtgggctttgagtgtttagtggtagaccactgttctacgaaatagttttgacttgtagtgtatgtgcatcatatgcttttttaaaaaagaatatctttgtgtggcgatctatacattaagctattaggatgcttactaatgtcctgccatgtgtttagaacttgtgatcaaaggaatttcattttcattcttttgggaccttgtagaacatattctgtgatccatcccatcaatcattgttcctatgttgtgattactcctatactctgcttaactgtactcctatactctgcttaactgtggccatgtttagtttcttggctaatttttttaagtatattcggatacatatttatatttaaagtattaaatataatctaataataaaataaattatagattccgcctgtaaactacaagacgaatttattaagtctaattaatccgtcattagtaaatatttactgtagcattacattgtcaaataatgacgtaattaggctcaaaagatttgtctcgtaatttacatgcaaactgtgcaattggttttttttcgtccacatttaatgctctgtgcatgtgttcaaacattcgatgtgacatttttggaaaaaaaaattgaatctaaataaggcctgtttttgtttggtcaatactgctttaatggtgatacaagtgtcatctgaaacaaatgtgcaaaaggcgtatgagcagtttgatagtataatctgcttcatccatggcttcttttttggcggtatttttcaatttggaggtttaatgtcagccaaccatgtctatttttgttctcctgttttttgtgaggaattcctatcttttatttgaggaccatagcatccatatcttgataaactttattcctctattcaagtatgccacgtgtccaaacatcaccacaagaaggacaaaatagttgcctttgcacaaaccacatggagaggagaaaagggaaaataattgtgactcaaattcttggagcattgggggctgtaggctgtaattctagccattcacataggatagatgccaaaactcatgtaagagcaggtacaatagcaagctataaactagctataaatatattttaaagagataaagaagagagagaagagtagcgggctacagatctgtagctagctacagcatggactcaaaaacataacgtatatattacaggtgagactatgcattaatagtatatagtaagcaactattatatgaattggctactatattggctgtacatgatttggagctagtagtgagctatactattagacttgctctaaagcatacaacacctaactacttttttgcatgtacctaaaatgtttggatatgtatcctaaggctcatatgcaccatttaaaagaggctttaacaccaaactaataaaaagttaatacgccatttaagggtcacaggtaaaaagattcttctgagaaggtctaaaacgagtattttctaatgtagtctgggaaggcatagatggaattacaacaataccatcaacattagttgcggatcgagaaaaaaatagtttattggtgttactctaaacttaatatccctcggtacacgatgtcatattttcgttttataggccatttaacaatggattttctcggagttcatcgggtctattgatccaatagatctaatttacatctcctccttctcgagggtagtagaataaaagactttggattttgatcaccaatgaaaaggcccaaaactcctag

SEQ ID NO: 50859 - DNA, 2306 bp, Oryza sativa
cttcatacatcgatatttgtatgtctggcatagttcaaatagagatgaattattgatgcagggtagctcctggctatggtggacctagaaaaattcacctgtaggatctgttataatttattcctcaagtactatggtaatggtctagggatcactcccacctattggtggtccatttagtattatttgcactcaaatgaactagaaggggtcaatgggtcagcctgatctggtccacttgcatccctagctaaactatcatattaggtaggcaatttcttataaatgtataggatgatttaactgaacactcagtagctgctactcatccattgcggctttcatttggttactgatgttgccacagccaaatcaattaggcgcaaatctgttccattattacctgcttgatgttctgttacatatgttttgcaggcacacagccataagttggtgttccatgagcttataagagtgatgccattattggcatgtttctatagcatctagcatctcccaatgttatgcatgtactgggctcccttaaaagatggaaattcagaagtctgatcatcatgagcagaatcttacttcaccaagagggctaatccataaagtgctgcgtcgcacaagtagcaggcgttctccaactgcagcagaccataacccttctcctgtattcctggagacaagcaattcaaaattcttaaagcaaaaggatattgatgatgccatcaaggatccagagaaggcaggcacacacgacaacagaattgaagatgagaagtctgatttgttagggtatgaaatttgttctgggaagcttacattggataacaaagccaaaagtgcatcaggtgaacagtctggatcagggtccagtagcaattgctttgatgctagactcactactgaagccttggtatggggttctaatatccttaagctcgaggacattgtatctgtgagtttttagctcattgactttattctgtaaattgcgttggtatgtttctgagtttcactgcaagtccacatcatgtgagagcaattctaagatcttttcaactttaacattgcaggtatcatatcattccgggctccgtcacttcactgtgcatgcatgccctcttgaaaaaagatccagtggactttcctgctttatgaagcctagaaaaattcaaaaggacttacgtttcctatccacttctccacacgaggcttttcggtgggttaatggttttgcagatcaacaatgctatgtaaatctattacctcaccccatggcatctagcaagaagcattcatctgaactcattccatttgataatatgtttgatccatgtgttaaatgccggtctcccccaaagatacttgtcatcttgaatcctcgatctggacatggtagatctagcaaagttttccacggaaaagtggaacctatattcaaggtatgtctagatgaatagaatcatgtgcattattttataatcagagctgtgatgtctgcctcatcaactcttaagcatgtttgcagcattagctatggtcatatagtcattacataactttaaaaaaaatgttgcaatgagtgtgctttcatgtttccttatttaccattgacattggttaccgataaaaatgcaagtcatatacctaatcgtgttgacctttttatttgtagtaatcaagtaagatgctaactttgcataggtagatgaaaaggcacgaactgtttctttattatgttccttgatccatctccataaaaatgaattcgtttgtagtagaggaccatatcaatattcatgttgtcagtatcttaccaagatgagcttctctatgtataaattcatgtttgagttcatattgtgccctaagaatcatctctcctgttgaactggagcatgctttgctatccatttgttgccaggagccattttgaaggttctctggctctagtagttcacattatctgtcaaggtccgctggttggtatgattcatatgtttgaaatgttcctgaactttaagggattttaaatctctctctctctctctctctctctctctctctctcgctgtgtgtgtctgtagctgttgtatcctttcatccagtctatttgaatcaagatattggtattacatagacacgtgtgatggagtaatatcttgatacactgttgtctctactgcgttacatatcaatcttgctgcttctagtgccatgccttgaagattatttctgccatgtcctatcatctctgtaatgctgaatttattagggatgaaaatgggctgcaggaa

SEQ ID NO: 50860 - DNA, 783 bp, Oryza sativa
tttggcttaaatccgtgctatatgtaaagaggagtattgaagtgaacactactaaataaaaaacgagtttttaggtaaaggaatattcccttcttgggatttttttcagcagtactcgtcattctattctataattctgactgctccttttactattgactagtttctctgcatttatctgtttttcacgagcttgaaacttttataagcacttacatatctttggattgattacctgtagatgcctaaaatagttcagcctaggatatctgaacaagttggaacaatagagtggtataatgggataaaaatgacaaaatacacgggggattgatcgaattcgcttcgttatgggaataaagaaattattgcgtaccttcatgatgggcgtctagatatttccgcttgaggctgggcagctgttgccgcaggcatgtagggagcacttttagagcagggcattcattaatgataagctgttggagggatgagtatgcttgcggtgaatcttgtagcgatgccaggcttttgcagtggtggagattgagttgtaccaacgaagggagctcgcccgagtgagactccagtgattcaggaggagagaagcggtccccagctggtgatgatggttccaacgcaacagcagacacaatgttgtcgctgcaaggccctgctggcccgtgtctctgctggccgaatatcgactcaagcttagggttgtcgtctatgtccatttccttgagagatggtggggcgttgaagatctctaccaaactttcacat

SEQ ID NO: 50861 - DNA, 1105 bp, Oryza sativa
cctgcagcccctatactgtctacgaactttgaacctttctgactgcagtgatctctatcgacttccaaaacaaatgaagtacatgacagccctctgtcacctccacactcatggatgtacaagtttgaagcacatgcctccagatttgggaaaactcacttccttacaaacactcacttgttttgtagctggtactggctctggttgcagtaatgtcggagagctacaacatttagatatcagcggtcaactagagctacgtcagatggaaaatgttaacgaggaagatgcaagactgatgaaacttgaaaacaagaagctctcaacactttctttagtatggaatgaaaatgacaaagaagatcgatcttacaccaatgcatcagattgtcatgagaaggtgatcgaagctctcaaacctcatgatgagcttcgcgttctgaatgtcaaatcctgcaagagctcatctttcccatcatggatgggtatgcttaaacgccttgtagagattgatctaaataattgtacaatgtgccaaaatattccttcagtttggcagctacaagatcttcaagttcttcggctggatggattccatggactgcagtatttgtgcagcattggtcaaaccatgagataccgtcaacattcccaaaactaaaagagcttaaactaacaaacttgaagagtttcaaccgatggtgggaaataaatgagagacaagaaaagcttgattttcctcagcttgagaagctggttattaagggatgtggggttggagagctaacatcactgcctactagtgacagtaatatgtcagagcctgcattaccagctttaaaggaactcgaactctgtgatttaaatcaattcgagagatggcaggcagcggaaggaacacaagacaaaccaccgaccttccctaaccttgagaacattagtattgtgaaatgtccagaagtgacaagtctaccagaagcaccaaagctcagtgtgttagacataggaaatggctctgaacagatgctcctttgcatacctagatacatggcttcattgtccactctgagattgcagcatgaaggtgaagaaacaacacctctaa

SEQ ID NO: 50862 - DNA, 733 bp, Oryza sativa
aaactccataggcaacatacatacatgttgatatccatgtcttcttttggagatgattcacttttatcaactgtcacgaccggaattaacccaatgggcgttccttacgtgcgtgtattattccttgtcccagaaggcaaggtacaccaagagttgatacatttcagagtttatcaagcggaagcgtaaatagttaatttattacatgggcagcgaaggcccggcacacacaaaaacaaacgagaaacagcggaagactagggcgacgaccaaggcgcttgacggcaggcacgagctagacaccaaaaccttcatcttccagggactcctcttctgagtttgggaaaaattgagcaagactgagtacaaccaccgtactcaacaagacacacccacaagtgcataataaatgcaagggagtacaagggagttgtaatataaagggttagggttgcagtaaacagcatttaaatatacttagttgctcaaagctattttgtaaacacgattctagaactatacaatattatttatcaaggccgtgaacccacacgaacctgcctaacccaaggcctacgatgattcagaccgaaccggcaacccgaccctgggtcccagctcgtcccaagccaacccaggtcaaccattccacattttagttgttaagcaggtttcaagaattaaaacactaacttgggtacattgctcggcttgcccataaccgagggcgcgg

SEQ ID NO: 50863 - DNA, 739 bp, Oryza sativa
catgtggccagccacgctgtatgcgtcgtaaggcatatgaaaatcatatatctcataggtcgggtgggcgggcgcctgtaattaaaagtcgattttcatagataagtctcttaagatatatctgtctacgaaaatatattttcacatacagctaatctatgttgtcccgataacttacgtagtagtagtagtagtgtgcattattatcgttgttatattctgcggctaattaaaattctgagttcctcactgaaagatacgaacaacatatttagttacatattgaggcagaatttgttccacgataaattcaatttagcacatacactatactcccgcacagtgcgcacatacatcgtaaggtatatggggtcaaaattaaacctaacaatgattataggtccattaattttcggctgtatctgaccaaagatggacggaaactagagacgtacgcactgttattttgtacgatatcaaaaagtatatattttgtttggggtttgctagcattcctaatttaattgggacgctacacaaccacgaatgattcggccgtgtgacatgggatgaatgattcactcgccccaaatcatgaactcgtccgtgatctctccggtgtgaagatcacatttcattacctgagttgaacatctcgtgtctgctacacccacaagacaacacgttttcttcctgacacctcccaactctacaactaattaacgaatatgcatacaca

SEQ ID NO: 50864 - DNA, 921 bp, Oryza sativa
atagtttatttaaaaattatctcataaataacagactaaggatcgaacaatatccttttaaaataattcaggggttctatttttctaacttattgttgaaggaaaacacgatggcctaggagagcgtccagttttagctcagtttttattcttcgtttttttcagtttttatttttttccttatcccctggcattggccctctggccgattgcggtgtgtatctgaactttttttgacgtgcaatttttttgcgtgtttggaaaaaaggacaccatacatgtcagcatatgtagatatttagtgttaaggtaaaaggtgcgcccacacaaccattcagttcttcaaactcagagagcttaatttttcttggaaatgcattctcatgagtagatgtcaatatagttgactgggtgaacccaagcacaaattgtacattgtaggcttgggaagcatcaagaatacgtgcaacattccaattccccttctggccgccatgatgtgtgagctcgctgcttgattttccaatgaagcatacgctttgcttgaagcatcaggactgcagctgctcgtcgcagcggagatggcgattgatggtagctttggcctttaattttgagcagctggaataagcaatccgcactttgttttgatggaacgtactagatcgttatgaagcagttagcctaattggatctgaattagtggtactaattagtattagttatgctaattagttgtggtaccactgtcaatgtaatctcactgagtcgttttgttgatcattgattagtattcagaatttttttaaaacataatacgcataattcaggtacaagattaacgaaagactgtgtgacataatttaagattaacgaagtcaccacgagcaccccaatataaatgtgactactcatatcaag

SEQ ID NO: 50865 - DNA, 1127 bp, Oryza sativa
ctggagctcgcgcttgcttagtaaaagttgcagaggtataccttgtgtgtagtgagagagtattttcaacaactaagctaaattacgtttaggaatgtatttcatacgaatgcttcaataaagttttaaaacaattagttagaaatattgtgataatataagttagtgcacaaacatactgctacaaattcgttctacactaaataaaaaaaataaaaacaacaaattatgtctgcactatatatatataatagtgcccagtttttttttatttcctactactttaaaaaagggatttcgcaagcgagccacattgaccatcgaggtggttcatgaggcaagtcgcttgtgcagctcgtgagaggtggcggtaaggaccaactaaggaaatagttagcctctaaaaatcagttttttttccatgcaatcaactaaactgacaactcgcgaaaataccatattttcgttggtggttggtttatgctcccctatgccgtaaaccgactgtctttgaaaatagccttcactatatacatcttcttcctcaaactcctctatttcagttacattgttcgtgtgagcatggatgaaaccaaaccatgcatgcattcacaaactaaaaggcttgattaatatttataaaagattctgagcgacctatggctaggcaggatgagtgaatatgcaagcacatatgtgggcttgggaagcgtcgagaacacccgtggcacaacgaactatccttttgctgcttgagcatttgtggtcagtgcaaagtcaccttcagcgttggtacggcatgattgtggccacgacgcgcgtgtccatcgaaaatgtgtttttttggcgtggctcagcttgtgttcccctgatctaatcttatcgaattgaagttggagttaccatttcgcgtcgatggtgtgatgacgatctatgaaggcgagttgttattaccggtgttcatcgataaaaccaacattgtgcttttgaggttgctagtcttgttcctgtggttgtatatgttgactggtagtgtgttctttgtgtccatggtaacttaatttagtctggtttttcctaagggaataatagctatacgaaacttagtcagagagaggatcaaaccg

SEQ ID NO: 50866 - DNA, 2171 bp, Oryza sativa
ttgcaaagtgacatatcacatattgatttatcatactaaatttttttaatttttttatgacttttaagtgacatgtaaaaacgaaggaatatccccttaaagatgaatatagttttcccttctcaagaaagtaatatttgtccctcaagaggacatgccctggttatgcgcatggcgttcaattaataaagattcctggtcacatcagtagcaatgtttcacagagtttaataaaactgtggacatctctatacataactttcacagccgggcacatgctgaacacaaattttcaagtttcagaatttacagagttaataataatgtaatgtaaggttgccgtgttttatttctctcttctattaatgaatgacagagctcctgtcttttccctcaaaaaagaggtaaggttgcccattgattgatcttgcaatattatgcaaaattatagttatgtcacctgtacgcaaatttcttgtcagatgagccatgtgcaacaatacaatttcacatgaatgaacagtgtactcccagtacagaactacaatcaagtgttgaaattaaatattgagatggatcaaggaggcgcatatgcagaagcagtacattggtttattggttcttggcgacaagggttttattggttttcagtcgcggttttccgtaaaccggtgaagagcggtttttataacgaaaaagaaaaggtaaacctggttgtaattcatgcggttttagaagttcaatactatcaaatttctggcattattgtttaggggataaattggattaattaatgcaatatttcaggcggtaaatcggacctttttaattaagaaagcgtgtcacccgtttcatcagaccgacggttgctgctgataactcctcgtgtcatcgtgttaactaccaaaggatattctaatatattaccgaaagatatgagcaggccgaatgcagagtttcgtaggttttttgtctgactagcactgctgaacgtttcaatatgtatagaaaagagataaaaggcgcacaaactgacccaagccatctatctatctatctatctatctatctatctatctatctattatctatctatctatctattatctatctattatatactaaaagtccattaaactccctacaaacgctcttaagctgccacgtgtctccctcaaaacactctcaacttgccacgtggcgtaacgagaggaattcagcacctcgtagggcccgcacattatttccataaatatatgtacgtgtacacaaggcaagatttgaaatctatctaaaagcaaaacatgtacttgtcgtgaacgaacatagattagttccatatttgtgtgtgagaggcaatattccaaatctctcaaagcaaaacattccaaatctcaaaaagcaaaatttagatcactaggaaagattattaattgcaacaaggattagttccatatacatgagacaatattcgtaaggcttgcatgcatatatatacaccccgccagcatgcgacattagtcgattccggaagaagtcgattccgacgacggagcagaagaagtcgattccggcggacggagcagaagaagtctgcggcaccttgcgaatcatctttggcataagaaggtatatcacgcacccacaaaagaacacaatcatgacatcatctaatcatgatcttgcagctaggaaataacatatgcatctatacagttttgtcatcatattttcaacagaagaaactaacattgcacctacaaaagaacacaattacgatatcctgtattagttagaggtacattatgttgcatctatgtatacaattttgtcaattttttttccagcacaaaaaagtaaccttgcacctatcaaagaacacaattatgagagtttgtattaattagttctataaaataacataaacatgtatacgactctctgtcaaatttgtttagtaactatatgcagtactactcatttgcagataacatggcacctagcaatttgattactgcattaacaccaaagaacgataggtggagaatcaaagtaaaagttattaggctatgggatgcggttaatcctacaatggttgatgagttctatggtatacatatgattgtactagatgcagaggtatgattgttgtaaacatgtgatttaatata

SEQ ID NO: 50867 - DNA, 1474 bp, Oryza sativa
tttgatgaagaatacaatgaaaaggttacacaggagagtacaaagacgaatccttctaaaagaagagttacaagacgttttaaaacatctaacaaggtacttcatttattttactttccaaattcactcaatttagttttcacataaattatttaccatttcaatatggcactatgatataggctaagaaaggaaaatgttctgaaatgaaaactcagagaaataaggtacaattcttacttttctttcatatacaaaacgatttgtcaaactattactgacatgttatatacaattgatgggtattaataggaaccatatactactgattgtgagaagatagcaaatgacaaaccaatttcgcttgatgatgattttgatgaagaatataataaaaatatggtcatggcggacaccagtacttctaaaagaaaagtcagacactacataggacaaactaacattgtacttcattgagttttactttctatttaatgttacctttcatgtttgtccattaatgtcaatatgctattgtgcaggtaaggggaaaaggttgtggaaagaagagtacaaatatgggaacttgcacaaaaagtgcaattgaaaatacaattcaagatgatgaagtatttgatatatttgttaaataaatcatgtattttaacataaaacttttttaattaactaactaagaacacaaaatttaggtgcatgacggaaaaattgctttaggaactgctaaaagaccatcaaggaaatttataatttcagatagtgaggtactgcatgagacaatttatcaagttattaattaatatatattttttttgtaacaactaatttttttccataggatgagcacagcagtaatacaaaggtgactggggacagcaccagctgtaatagtagtaaggaagatataaacaaaggtcgatgcaattataatattgagaacattaaagttcacatgaatgagcagtccagtcgatgcagatcaacaaggattagaagaccacccacccgatactcatattaggtacaacatattacttctgggaaaatgttggttgctttagatttggtttgattagtaaattataataatatggtctttcgtctgcaggtaatttatcgtcaagaaggcccaaaagaaccaattaaaaggagggttcagccaatactttttattgaagaatagtattatatatgttcctattaatttttatgttcattagatattgtcagatgtaacgtacaacttgcacttgccaaaggaatccttggattactttgtttatttctaagatagagagttaataacattcaatataaatgcatgcatgtaccttcagtacatgtatatgagtcgatccctgcttgcttcctctaccgttgatatcctaaaagcatataaaacaagatcagttgatttaataattcttaattaatacaaatccccgggctgcaggaa

SEQ ID NO: 50868 - DNA, 1714 bp, Oryza sativa
tgcagctgctttattcctgcttctctccagtacaacattgattgtgctacaacatactctagcgaaaggctgcaattcaaaattaccatttacagtgagtatttttaccagctgaaataggatgatatttcaaacattatatcttcctttcacaaacaatatatttcatctttgtactatattcaataattactacctctgttttcaaatgaatgacgttgattagtgcaattttgaactaaccggcgtcaaacaaaaagaaatggagagatataaagttataggataattacattttccttctattataacatttttccccagaaagtaaacatccatgaaccatttatttttttagacaatggattaaacaggcttaaacatccaaaatacatgtacacagccaatgagccatttaatcacatcataattccgcaatctttcgtattatgcacataccgtctttccatagagctgtgaacaacaactccatcgctgccaattgtcccctggcgaacaccccagcagctgatgccaaatccactaatcaaggaaaatagagaggacataaccaatacagacgaaggaagatagagaggtcgacacaccgcagccgccaacccacccactgagctaggagataattcaaggaggatgttgaggtgaggacggaacatgggaggtggatatggacatggcgctgcaagcctgcaacagccactggagggagggagtcgggaaactacaggagacccacgccgtccccgccactcgctgctctccgcccgcggaccacgccatccccgcctcctaccatatgaagttttgtgaaggtctggtatggtaattatatataaaattatcaaattgaaagcattttttactttgaagttacaagctttttttactacaattagttaactacgaaagctcaattatacagagccatacagacacccttcatgatgggccaaaaaatctcaaatatgcagtacaagagggataacttgaacgtaaagcagagacaaatcgatacagagcaaagacatgggaacagagcaacaggacattagtgcagtacacattgacgatgcagggatgcacgatgcaatacctgaggacagcgcccgttgtacagcccaatcgcgagtgaagcggttggcgatgcagtagctcggcggcgcaaccagctcggcctcgcactccacaaccttgcgggagcgcacgtcagatcgagacctccgtccccgccacccgcgtcgccgtccccccgtccacagcgcctgcagctctccgctaccgctctctgcccgcaacccacgccatccccgccgcccgccgccgtccccgccatctacgccagcaacccacgccatccccgccgtctgacgccgtccccgccacctacgccgccaacccacgccatccctgccgcctgcgccgccgtcccccctgcccaaagctctccgctcgcacctccggcccgcgccatccgccatccgccatccgccatccgccctcctcgtccgcccttcccctcagacctcatcctttccattttcccctcttctgtcactctctccttgctatccatacgtatactcgtatagcggaatagaaaagaagagcaaaaaaaattagctgagacagagttacagagtattaggtgcctactactaattagtattttagtcaaagcaaagcgatgcaaaat

SEQ ID NO: 50869 - DNA, 4025 bp, Oryza sativa
gattttacacatgcttctaaaaaaccctacgctatcacatgatttaaaatcttagacctattattttggaccattacattatatcttttcaaaataaaaaacatatataaaatataaaaaaaaatatgaccattgtaactttaatcggtaaaacaattatttacatccgatagaccaatccttaaaaatacaaatccattccacctccctcccgtacataatcactcgtctctccacgatatctgtacgtacatgcaagatatatatcttgcatataacagaattttaaaaaattaccatcgagacaatcgtcaagctactaatgcaaaggttgtttgattattatttgtccagatgataatttgatctaactgggttaatacattttaaattttttacactctatccaaacatccattctattccatactatattttaaacattcatttctatcatatttatataccattttcttttcttttctcaaaatcatttatataccattttctattcttttctaaaaatcctgtgttacaaaggaaaccctaaattctttctaataacaacaaaaattatgatagtttaaataatatgcccgcgcaactgcgcgggctaccttcctagttcagttataaacggcagtgaagacaccatgcacgaaattcagaatctttttcttagagagtgagctttgagctagtcttcttgagctataggaaaagagagtttttcaagtccatcgggtggtacctccaggtatcggtactgcatggtaccaaagtaaatctaaccgttgaatcaatagggtcacgatcggaagaacaaaatgaggatggataaggcctcgcgagccgatcctcccgcgccaatgcgcgaccctgtcaaaggcgcgaggccaacctatcttggcattaacgcgagtccgtatctgtatttgttgaaggtggcctacgaccctaattcttttcgacggctgcggtggcacgtcggagaggcgagcccgaccacatttgatccacacagcggcaccgaacagatctaaggcagcgcagccaccctagttgcatatttctttcttttgcatcgatgtctcagcctggtgttgccatcttcgccaccagtgccaagccgcagtagtcgagtaaactaagccaccactagcgaccatctgtacgccgagtccgcaagtgaatccaccgccactagctccgatgagatagtcttagattggttgagggtaaatgagcatgacggtgtcaggaggtcatgtctaaaaggaattttgtttcggatgagaagatctagatcgagaacctccgtagccatggagaagagcacaagcttccactttctctgttctcatgagggtgaggacaaaggaaaaaaaaagcggatgagggtgcagagaaatcaaacgtggaagagagagagagagagagaggggggggggaggctgaggttgtcgttgatcttgggaggaaggaccatgctgccggcgtgtaggacggatgcagaggaggtgccttcgggtagatggatagggaggagcgagcttaatcaacacaatacaaaattcgaggtttgcccttccacttaatcatcctaatgcggacagaggggaggtacaacccaatgggactatggtacctcgcggtaccaacattcatcagccatcggatcaggctaaatggacgtacatgatttggtacctcctctccggatggatgatagtaaagctcatagggaaaactgcatgagcatattaggcccatgcagtttttcccatttttaaaattagcaatattatatatttaaatatagaggtacaggagctggtttggactactatttgtttcaatgtttcaatcttgaatcaataatagcctgagtttacaacagaaaatgtgcatataaatgatttaatgagttttgagtttttatcaggcttgatatcccagagttattttcctctacttatatccaataatacaagactgaagatagatatgagcaggtgaaagcagagtttagtaggtttgattctgtttgacaggagcataaattattttctctgttgaatgttcatatatagagaaaccagagacaaggtaaaaggcgcatacaaaacgctaagccattgatcagagtgagacacaatgcatcaaactttctaagaaaactgcatgagatccctccatctctgtacagctataggcttggaaagcatcaagaatgtcttcgaagctgcatgtcattccaacattgccgaacgctccacatcacccttccaattcttagataggctaggggatctctgcttcactatcttcagagcatagggagcctgacaattcctaatttctggagagcatggcgattctgtgatgctgtgtttgtaacatatggacggctcatgctcatgaatcatgattgcagtgctgctgataggtttttttttttttgaaagaagggcataagctttgccgcttttatattgatagataaggagtaaatagatatttacaggatccgacaaaaatcgtgccaggagcaaacaaaaagcctaatctcccgccggtaaaatctcaattagtttagtcgctcccgctgtttttttagataatagaagctttatttagactcaattaattacaatcaaactgagtcacctccggcctctgcataaaatgcacacagccaaaaaaagaagaaagaaacaactagaacatctcccaagcacaaaagtttaacagaaacatatatcgctcccgctgtgacccaagtatgcgcctcctccttgattttggcagtgatggtagcaggcgtggatgtaacttgtctgaagattctggtgtttcgctcgccccataattcccaagcaatctggatgatcattctgaaaattgtcaagggttgcagcagtagcaatgttagatagagtaccactggaaagccgtagacatatatctgcataataatagctgggaacatgctgaacaaattagtattacatgttcttaaattaaaatgataaagctgccgaatttacagagtcaatgtaagactgccgactgattgatgtctgtttaacactatgcaaataactgtacacactaatttcatgtcaaactacttgggacacggttgagtattgaaactaggctatggcaaattattttcaccagaagtagctcgagctgttaaaacagctgtgagaaaaataaagagtgcagatcatgagccacgcccaatcatataagagagaatcacataatgaaccgtgctcacggtacagaattgcaattaggaacgtgttgacattgaagattgagattgaagacgcacatctatatatatttctggagctaggtagctcgtttggcaagaaacagatgaccatggccaactgaagtacaaaagcctagctagagcttctgcaagagatgccatgagtgttagaaaattgcaagcatgagaacggtgaaatcatataggcttgggaagcatcgggagtgcatctgacacaggagcagcgaaggactgtgcagcggtacagctctccagactcatggcattttcgatatgaaacgaacacagaatgaatcatgcatatgacagttcagtagtagcttaagaatctatggagatataagcagcaacccttgacaattttcaggtgttttgtgcagggtgttggagcgatttctgctggaaacgtttcttggagctgtcacttgattggccagtcttgcaggtgcacattgtgcaccggcgtcatgtctgatagggagaaaccgaatggacagtacaagaacgcaaggatttcgcagttcttcgatccatattcgagaagcaatatgtcaaactccaattatgctggaggttgggagtgaataggcaggagtagaagttgcagagtaatgttgagatggaaggaagaagatgtcaagactgtactagaggtgaagatgtgatcctgcaagagtgattagtgttgttgtaaactctgctattgttcgtagct

SEQ ID NO: 50870 - DNA, 967 bp, Oryza sativa
aaacaaaacatcggacctttaattttcgcttaacatggtggacccattattcttcaccattagatctatctttaaaaaaaaaatcttaaaacccaatccataatctcctcccaccccaaccccaccacctaacttatgtacgtgacctcctctcccctcacgtacgtacgtacgtctctccctctcatgtccttcctttcgtcctgccatttaccttccaatctaccaattttctacctagcaaaattcaatatgtaaataaaagcaaattatctaaatgattataatttttacaatatttatttatctacattggccatgtttggatatacaagaatatatcatttggaaaaaaaactcctatcttttacatcaaaaaataaaaagttattaaatattaaattaataacgtgtatatgatcttcgctcactttctcctccctatttttttagctcgcaactcagtataaaaataaaaagagtaaatttcacaatattatatctatatatctatcatatactctctccgtcgcagaatataacaacctaggatataacaacctagaatgggatgagacccatgctaggacaatgtatatggacatgagctaggatgggtctcatcctatcctaggttattacattctaggacagaggcagtactaaaagtctattaaacttcgtacaaaagatactaagccaccacgtggcgctctaataatttagagaaatccaaaaaattatgagagaaaagcaaaacatccgagatgaaccaccatacctaaggcagctaatgtgatttaccaaggtcatcacgagtgtcgcaacagtactgatttgccaaggtgaagatgaatcaaatcatcagtgtataatggtttgttttgttaataacatgaaaacaaattgaaggtgtgatgatagaaagaaaagaatcaagcaccgaggtttgaaccattggatccat

SEQ ID NO: 50871 - DNA, 695 bp, Oryza sativa
ttcctgcagccccaagtgcacatatatgaaactatgaaatagtgcagtgcattaattacattaaccagatttaaaccaaacactctagccaaaatttaaattttcaaccataaatttaaaactgattttgaggatttttcggctaagcttattttttagcttttatttttagatcgctaagaacacgtatataaaagtttatttataaattacttttagtttgaaaatatgctaagcgaaacgatggctccgatgattattcctaaaagttgtgctagaagtagtagtcagcaaccagtagctagcaataaaaagtggacagaagacggtagaggacttcaataattgtgttagattcgccgagagtaccaacttaattatataatcatcttgaacatacaacatataggtccacccacctatataaaacgttggatatatatctaaatggatcgatgtacagaacacattactctagaaaactaacacatcatctgggctctccaatcggtggagctcgtgcatatatttaatttattagtgctttttaggctttggtggtgccgggacgaaatgaggtagctgctcctttagaggttatagcggtatattcagatgagcaaatttaatatttgttcaaattcaactaaattttgaaccgaaatttttgaaattttcaaaatttcggaaatttc

SEQ ID NO: 50872 - DNA, 676 bp, Oryza sativa
tcctgcagcccctgaaacctgaatgtaaactctttgtgaatccaaacacatggtatacatatatttgtgggcttggggagcatcgagaacatgcgacgcagtgaagacatttttcaggcagcaaaagatatgacaaagtcgcctgactttccagttggacctgatgaacgtcgcaaggtttccaggccgacattgctacgtgagattgatggatgcttcacgcaggttgttctgattatgtttagtatatggccgagtggattaactaggtgacgaattaaccaaccaaaattaagctgtttgatctcactaccagacttagcacctagcctgtaggcacgaaacccacaggaaaatacattttaccgtcagaaattgtttttctgtggatggaccgacagaaattgccatcagaaaaaagaccacggaccgacagcgctgtgagagaagagacaagagagtgcagagatgatccgtgcatatatatgcaacatagcttctcatgggaagtgcatttttgtccatagctcaaggggatatcctctcgttatgtgcatggcgttcaaaaagttatcaaaaatttttaaaaaattatcaagatagatcaatatataatatatcttttcacaaatatgcaagttaaaattcgacttatacaattcgaaacaaatatagc

SEQ ID NO: 50873 - DNA, 1203 bp, Oryza sativa
acttacattgtgaaacggaggaagtagctcatgctgctagaagacatagttggccaaagaatactagtcgtacaacgggtagaatgattgagagcaagtactataagcatctaaaacacaagcccctagatgccacatatgcataaatggtgaggtggaggagagaagaaaaaagagaaaaaatgagccaccccgcatgcaagggacaacctctttacaaactttaaaaaagaaagagaaaatagtgatgtaaattggatgaaaatgaataaaacaaatagttatgttgtattggactagtatatattggaggcaatatataagtatatgttgccttctaattaactagttgattatgtgaataatattagaggtggcaatcacctctactataaaacttgctctaatgaagcaggtttcagcagcgtaaatgggagctcatctcccaaagaaaatctgcaaatatatgtgtccaggccgacaccccaaacataggactttgtctggaaaattaaacagagcgtcgccaaaagttcagttctttacgtggctcatagcgaaagtgaggtcatcaaccaaaaaaaatattgataagaaaataataatgtcgtctcctatgtgtgacctcgtgaaagagaagatgaagctgccctctacatatgtgcctccaatgccctttcttttgctagacaacttgcttctgttttgctaaacaataattcacttggcgtgcatatccagcccatcgagtgaactagaaccaaaaaggtaggaaacccatgttttcagaattttggaagcaacattgtttatttgaatcttaaactcgcctaaactgaggatttgattaatttggaaacatttttaatttcccccttcaattcccctttcaatcccctccgactctaggtcatatgttatgttagaaatttggtcataattcggcatattttaatccaaaatattaagaccataaacatgacatttgcaatatgagtagatctagtgacagtgctagatgtatacaacttgagtatgcttaatatgaaataagcatcaacatttacatagtaacgcaatgctgccattgcgaagagtattaacaaagaaacatttaatagaatcaggagaatgaaagtataccccgagaacgtcccaccgctggattttgaggcagtattgcctccgttgatgtcgttcatc

SEQ ID NO: 50874 - DNA, 1810 bp, Oryza sativa
ttgtccaacaaaaaaattgcttccaaactttttgattcgacataatgtggatctccaagctagtattgcgatgtgtgctcgttaaatggaatcacatatgcggtcagaaaacacggagacctatatcttgagacacggaaaatgcaataatagaactcaaaatacaaagtaataaaataaatctaggtccccagtgaagcctaagaaaacagttatagcatgggcacagatatagtgctctgcttttttgaagccattaagataaaacagaaatgctataaattatcactacaaatgaataaaatatataaccttaatctgaggtttcatgcttaaagaatagtaccggctttcaattggaagcaagctcaaaattattaaataaataaaatgtgaaaccagaccatacatgaaaaatctaggagaaaatttcaggtagatggtgaacacccgaagggtaactactgcattaatgctgtctcaattcataactgaatgtaaagtaagcaaatagcaatagtgcagccgctgtatcttacacaaatgtcaagcatatacattatcggtttgcaagtttgatgaaaattatatctagtttatatatcatatcaaacggcgggagacttttacacaaagataccaaacatgggcacattttcaagctccaactattgctcagttacagaacaaacaaattaaaagccaaggcagcacacaatgaaacatcaagtttgtatcccccagtactgtacactactagacggtaaaacctgacggtccacccatagaaggtaaaatctattttcctgatggttttcggcatacaggctagccctcgaatttggtagtgacagtgggctagtggccacccaaggaaccagccggcccattgatacatcacaaatcaattaaaggaacaaaatatttgcttctaccaaggaaccagaagtatacgtacctagttaataagataacatatgattcgatgagcctctgggaagccattgattattatcaagtactatagttatataccttgaatagatgaaattgcagatgatgaactaaatagcaggggttattttgtgctcggtatggggggactggtgatctcttcttgttgctccatggagtagccccgttcctcatgtccttctgtcaccatcattttcccagccaatctgaccatatgttgtgaggagcagttgggaagtaggcttgcttcgttcttgatggcggcctcaactgcctctacctcctcaaccctcgcgccttggcagtgaatatataaacactgagttccttaagggttgagaggtggtggatgcccagatttcgattggcacatgcatactctgtggaatgtggcttgattctaaacgagatgtattcaagctttagcatggctccagcgtggaacatcatatcagtggcagaaaaatacaagtctagacacttcagacatctgaacttatttctgtttatgctaaacctttcagtggtgtcatgtgcgtacaaccttaacataagagaaagcaaggcaggcaagtctccaaggataaccaacacataaaaatttcaaccgccacagtttaactatacttttgggcagttcctttgtaccaataccatgaggtagatccaatgtctccaaaaacaacagttctcctacgtgcactgtccggttgtgcctgtttacctgctgcaggaagcagccgttgccctgccgtcgattctttgtgtacactctcgaaagacagctgttttagctagtaataaatatgttaagcaagatttttaaatattacta

SEQ ID NO: 50875 - DNA, 833 bp, Oryza sativa
ccaggatctgaaaatgacgaaccacatcctccttgactacgtgttcgctcgccaggtctagcaccaagttctttcccctgctggttggctagacctcgttccttgccacggctgctctctttaggtttggtggcagtcgtctaggacctgcctaagcatatgtgtgacctcgtcaaacagaagatgaagctatgacccatacatatgtgcctccaatgccctttcttttgctagacaacttgcttcttttttgctaaacaataattcatttggcatgcatatccagcccatcacgtgaactataaccaaaacggtaggaaacccatttttttttcagatttttagaagcgaccagttgttcatgagaatcttaagctggcctaaacaggggctttgtttaattaggaggcgtttttcccccttcccccttcaatcactgtaaccttccgactctagggtcatgtaatcttgatcactctttcgtaattgaaaattcaagtgcggaactcttctctcccatgatttgacaaaaaaaatgcttccaaatttttgattcgacataatgtggatctccaagcttgtattgcggtgtgtgctcgttaaatggaatcatatgtgcgttcagaaaaacatggagacctatatcttgagacaaggaaaactcaataatataattgaaaatagaaagtaagaaactaaatctgggtccccagtgaagcctaacatgggcacagatatagcgctctgcttttttgaaatcattaagataaaacataaatgctataaattatcactacaaattaataagatatataacttcagggctgcaggaa

SEQ ID NO: 50876 - DNA, 715 bp, Oryza sativa
tttttttctcccagcaaagattaggaaagttttgttttcaatcacatacaatgtttgtacgtacggaaagaaagcaggggccgtacaaactcatatgtacatgaggaagttattattttttaataatagatgtaatctaatggtgtaaaataacgggtccaccaatttaagtgaaaatcaacgatgagattagatagtgccatgtggcgacttaggagcatttgtaggagtgccacgtggcggtctaagagcatttgtaggagtttaatggacttttagtatataataatagatagatggcgaaatgaactttttttttaagaaaaacagtcggcacttgatttttttttctttttcttctttggagcaaaggagatcggcagggaataaatggccaaaaggccttacatcaggtctaccaaaagatgcccagaaacagaaattttaaaggagatatacaggggaaaaagggtgaaatgaattttccattatctagaaaaatcatctatgaggatgtagatcctctgcagtactgcatacgtcagtatctgctactgcatcagcagtactgcagacaatccccattgcatctatgggtggtgcttcacagcaaatcaacagctagacaaagcctaatccagcctcaacaacctgccaaaacaagaatcagagcacaggaaagtcatgatcatttctcaaccaaaagctcaaaaga

SEQ ID NO: 50877 - DNA, 687 bp, Oryza sativa
acactaatttattagagtgccacgtggtggccactgtgttctttctccaactttcccaacatctactcccttatttttcacatgcatgcttttcaaattattaaatggtgcatttttttacaaaagaattatatagaaaagttatcgtaaaaattcatactaatccattttcaagttttttaagctaatacttaactaatcatgcgttgatgagctacctcattttccgtgcagggagaaaaagtttttgtaggaatccactaagagcatttgtagcaagttttatagcgcttttagtatataatatatagattgatatttcattactatttggttgtcatataaaggatatgttctatgtcatacaacgtattttcatatatagcaaaaatatgagcaatataggttgctttaattataaattaagtaacaatttaaataaattaaaaagtaaagaaatttctaaaaaaaatgatggtcgtgacaatacggaggatggtggaggtgaaagggatttgttttcttataaaagttggtctaatagtctaactaatattgcatgaaaataagagataattaatattgcataaaaataagagatagaacagaaggaaggagagacttgcctgattaggatggtgtaggggtgtcaatacacgtaccgatgtacgtatatatatatatatg

SEQ ID NO: 50878 - DNA, 579 bp, Oryza sativa
aacgatattctgttgatgatacacatgggacttcaaacggtgacttttgattatttccaggtaaagcggattagttagttagtcatgttagcagttgctggtggaactagactttaaatttatttttcatttataagtttaagctcttgcttgcagttgcactagctcagttaactggcgaactgaaacttccaacttccaggatgaatgcacgtaataactgtctctattttgttgactgccatagacgactcacacctctgttaccaactcttatttaatactcttgggttctagttcagttttcacatatttgatttctgtaatgtagcaatgtccatttgtaatttgtactgagttagaaaaactggcttatgaccgaattcttccaaaacaagaaatgatatgttgttcaattttttttttgacgtgagatgttcctgttcaattgtttcagatcacaattcacaacactcaacacagaagtggatttaggtcaaacagttagttctaacttctaaaccccagtgtatgtacaacatatggacagacagaatactgcatggctgattcaacact

SEQ ID NO: 50879 - DNA, 667 bp, Oryza sativa
agagggttgcagggatcaaacaagtgcagctcgccgacgagatttggtgtttgtcctgttgctgtaaacgtccaatgttttaggttggccatggcgatcaaagtcctgatgacaccgaatactgatctggaatggaaatgcagagctgtgatcattcagatttcagagtttcgcatctctgatgatcgtcatctgaatggaaccagtccctgtttcttggactaaacttctcacataatccagttgcgccaaacattcagctggatgattggctttcaggttccgattgttcacactgtcactacgattggaagtactcgtagtataataatcaacaaacaataacagtatattatggtcttacagtttcagataataaactccggttgtcagtcagtcgccatttcaacgagactgaaccagaaggttcatactgaaccaaacatttctcaataatctgaactgtatttctgtaacatttgtcagccaggcaggattagtttttccttgagccgtgagaccctgacaccagtggctatgtcgaattctcgatcgattggcaaggctagtactctactgctacttgacaaatgaattcagtcaaaagagagagttgcttcgagactttcaaccagaagcactgtatcaagttaggctgctaatgcat

SEQ ID NO: 50880 - DNA, 589 bp, Oryza sativa
tggaatagtagtgtttttctattcaaatgcaaatcacgtgctctgagccctactcatgaacaatgattggagcatactaacactacagtacaattattgccaagaaaaaaaatggtacttgatgcgcagccatgttttttttttatgcttaaccgatgaatatgcaagtacacacgctttcagttatgatttttgtaaaacagctttacgcacatactactaaatcttttagaaaaaatgtttagattgttttaaactttataatagttaatttatttatttatactattttataattatcataaattatgaaggtattcagccattgatgtaagaacattatgcaagtggagactatttcatctgaaaaatgtcagtatccagcgatgacatcaccctctcggcaaaccattttattttgaaaacgacctccacaaaccaaacatatttggctcacaagcttcccaaaaattccaggacgaattcgaaaaccaaatttcttaggggctctttagttcgcaaaacaaaattttcacctatcacatcgaatgtttggatacacgcatggagtgtaagtgggctgcaggaa

SEQ ID NO: 50881 - DNA, 696 bp, Oryza sativa
taagcagagaagatctgtaatttcagtttctttttgtcagaacacagctactgcactttgtattgaaatgatcgtgtcagcgtgtctctgcactcatcccaatctccgcatgcatcgcgtgttcttgcttgtttcctgtgtggtcgatccaatggtcggatctccacttatcacggcgtatgaattcgtcaaagtcagctgctgccatggatcgagagcttcgaggtcgcctctacaatgtcaatttctctcttgatatatataattatattcatcagtagattcttgttctgattttgcataagtcaaagtcaattaaacagttagtaattctgctaggtatagcagtgtgagtcatcagtcatggagtgtaatcgagttggtggtttgtttactatagtttcctgctgtgttcaattaaatggtcgatctttcatacacgatctcgatcttgatatatgcacacatggctagcgtaatcatgctgatgtttgcactattaacaaaaaagaagaacaacgttatattttggagctgtatgaaggtcttttgatttgcattttcagttatatatatgaagaatgtttttagaaatacttgtttaacctaaacatttttaagaacatatataggagtgctataatgggctatattttgaatccaagtgatttcacggtttgagaagttattggggag

SEQ ID NO: 50882 - DNA, 1409 bp, Oryza sativa
aaggtctatatgattttacttatttggttttggtccgcatactggtagtatgcctgagagtggttatgttgatgactgttaagagaatgacaagtcaatatcttgctttgatacctttttttttttgcatttttgatttagctaaaaataaccatgtactgataatggttatttttattgttacaaattccaattacatgaggatatgttttataaattttgggtaaataggttgtgcttcagaaggtgtagtttctaaaatttttagtgtaattatgtactcgggtgatatattttgtcaaaaacgtgcattgcacgtgcacgattactagtttagtaacaaaagcaacagaaaaggatgctttaacatatagaagttgaatctataggatgaagattaagggtgcacgtaaaacgagacaagtcattagcatatggttaatgaagttttaattattaaaaaaaataaaaaaatagatttatttgatttttttagagcaacttctatatagaaagttttcgcacgaaatatacttgttagtagtttgaaacgtgctaacggaaaccgagaaaaaatctgtatgttattggaggttagaacgggaccataataaagtgaattaactacaccaaccattgttttagagttgaaaacttctcttcaccggtttgccaaaaatggataatctcccatgactttcgatgttataggaaaaccagctcaaatcgataggtttatacaaatcaaccaccgatggactgaaaaaactgatcaattttgttagacatgaacttcacataataaactaaataatacaaccgatatagatcactactacaaccgatattggggagcttataattctgagaagcagctggtgaaaagctagctagtgagaatctagataagctgacaaaccttgcttctagcttctaatttattttctagattctacaattacaacatttcaaaatctaggtgaatatatgtactgtttggaggagcttctgacaacaggagatcataggagaagctgcaacggtcaaaagctccccaaacatgcccattaattagctgaacaatttatgatgccacatttttattaaaagaatattcaaaacattttagctgcaaataaaatttttgttagacacactatataagagaatatgataaaatagttgattatctacttaaaagagaagatagaatagattttagaaagatgttcattaaacagattaatttgggctataaacaccgtaaaacagagtgcagagtgtagactacgacaggaagggaaaggtgcgaatattagatcagcatctctccggcttcaccgaactggcaagtgggcccatccctccaatctcggcggatcactctcataccccatcggtccatccgc

SEQ ID NO: 50883 - DNA, 1018 bp, Oryza sativa
cgctccagagtgagggaagtaattcgtctggtatgaaaagctaaggatgaagaatgtctagttttgtgatttagggggtaattcgtactgtccctatagtttaggggtgtaattccgactttttcctagtgggaatgggaacttataaaacatataaaatgattctgtaaaagtaaatctgaaagcacctcaccctatcacaaatatggatgtatacacaattgtgttcgatttcacattatttccttttttttattcaatgtgcggatatcaaaactttaaaacctcccaaaatatccatcctacctcctcccgcacacagatacacatagaaacaagaaagccaggctgtgctcaagatcctgtgctctctccaatggaacctgagtcctccctccacaaggtaacttaaggatcggaagcttagattgtactcaatttcttcctgctataattatcacaaactcatatgaccatcttggtgttttggcgttgaaggttgttgttcctttagatctaaactatccgaggatttgttcccactgccaaaccagcaaaacatcggtatggcgcaacggcccctttggccccaaggtaaagaatagatctataaatcatctagatatagcacctatatgttgctcagagcttgttgatttgaggccaattctttttttaattacgatatgtttatgtagtctttgtgcaatgcttgtgggatccgatatcacagaaagggaattgatgctcttgagttagaaggtaagaggagcaaagacaagaagaggaagacgagtagaaacgaggttccactccggaggggattgaggaaaaataataagaatgcaaaggaggtagattttggagtgaggatgatgatggagggatgccaatcagaaccgatgctaacacagggccaacaatacgaagatgatgtgaagaaggctgctatccaactaatgtacctttcaagggccgcaaacacttaatcaagcacaagcaatagagctctctatgt

SEQ ID NO: 50884 - DNA, 2423 bp, Oryza sativa
  unsure (1)..(2423): unsure at all n locations
attttagatggataggtagtgagctgtccttgtgagactgagcaacaaaattatcccttgtatatgagcaacaactatagaaatttcgaaaagataaattactgagtgctaagaagcctgcacaaacaagaaggaattatccatgttttatttggcattgcatgtctgcaccagcataaaactatcattgatccttttcacttgttagtcatgatccagcattccagttgctaaggacttacaattagctgataagaaaacatgacaaagccatactattggatcacacgttcaacacataacccgtgttaaccaaacaaatcaagattgactcacttctatgaaaacattatattaacgcaaattatctcaaccaaaaagaaggaatagaaacaaccagtaatctctttgatgcatagtagacaacatcagatgccatggtgtcctcctgatggatttgcttcgacagcctaaacgtttttcctgcatttttttaacctaaaaagaaaagttagataagttcgctagatatgaaaaagtgacatgaattgtgatagttaatctacatattgactaagtttgctaaacatttcagaatctagaacacaccatgtatatttaaggtaacatagttgattaactatagaacatctacaaatagtgcaattcatgcaatagtgttctatgtaaaaatatatggaacatgatcctgacctcagattgtaagtacagaacctctatgctctcattgcaagtgcaagcagctaaccaacatattaccgtttttgctttgagtatcttgtaatgaacgtgtgatacaatgcaattacctgctacaagttggaagtcatgatccaatttcaaagaactgtcattgattgataaaatatgtgacaaacggaatacaaaacatgcattgaggtgtaaaaatcaatttgagaagtagaccattagcaatatatggatttgagatctatcacacaaatatgaatgtggtacttgttattatttagtttattacgactttgtaaatgaaggaaaatatggtgtgtattatctgtatttgcatacgattatgatgtagagcatcntctgttgtttattgaagtaggtagaggcaagcagatgatttttttttgaaacacggcaagcagatgattgactcgaatacttctagccacacaagtcaaatagctcccacctgacaatatcggtggattatttggagcaacaaataacatcagttctaaaacctgaaaccaaaataaaaaaattctgctactgctgctaacatgtggcattagtttagtcaaaataaaaagattagccactaagtgtgattggaattttggcactacaaaatcaaacaatgattctttgacaacttattgcttgtattattaagaacctttgataccatcaattttcaatctgttgcagttcctgctacagtatgcaacaaagtttctccaagccaagagtttcagcctagaagaaatcatatatatatatatatatatatatatatatatatatatatatatatatatatatatatatatcaatctgaccaggaaaacacatttttttactactgaaatgatttaccaggttggccaaaggattaggcctaccaaatttattaagatttagggagaaacaaagtacaaagtactatgatgtcgaacaaaggtatgaggcaaagcatcagaccacaataaacaactaacactaataaataatcactgcaggataaaaaatgctagccgacttccaaatcgtgatctccttgatgtctccaaataattgctctgtaggtcaagacctctgctcaaatacccaagtgttccgtctttccagatcaaccaacagatcatcatgaatagcaagaatcgaaattatgcagttcactatataaacatttggtctttgccatgaagaagaggttgtaagccgatgagaaagtaaactggccatcacctgttagctagcaccgaatggagtcggggctattcctggttgaagctgcaccatctaaatttcatcccacaactgaaagaactcagccattgctctgttggacaaggaactctgtaggtctctcacccatcagtgattcaccaaagcctgtgccagcatcaattggatctgcctacatatgatagaaattagtgttagtgctatagccacgtgctgcaccgtggttggaaaaattgcttgacctttctgttccaagcttggcatgccattttagccatagtgcttggccaaagaagtctaaatccagagttgatctgttatagagtgagcgataattaattgagcaagaaagagcctgcagagaatctactacagagttcatcagtgtatgcaaagaaattaacccctcagaaaactactgattgtggtgaaaggataacaat

SEQ ID NO: 50885 - DNA, 1178 bp, Oryza sativa
gctccaccgctcacatcttttatgcagaatttgcactgaggaaagatttggctataacattttgtgactgctattttcctgcatttgaactgaacgttcttatttagttttaattctgatgttataaaagttcttgcatttgatattttttctccttccctttgatgctacaaatttactgatcacaaacgattgaaacataaaaaccttctctgttgttttccattttctattacaattactgattatgctaaatgatatttctaatatttggtggcagtcataatgtttttatatatcccgaagctgtttggtcattttttatagtatctggtgttggggaagtatgtgggttgcactcctattaaatttcacttgagatgttccaagagtataaaattggattcatttttgccaaggacaacctttgccacaagtctggagaagattttgtgaagcatctgttttgtgttatttctaatatatatatctttggcaaaagagtattatgaaatagagtgctctacaaatatttataaaggcattcatataagatgttggtccacaaactgcacatgttttttatgcaatcaaaccacaccttgcttttatttttgttgttctcctgcacttccggtctttccacagtgtaaatcttgttacacacatatttgcttgctgctatttattgtcagatattaacaaaaaaaggaacttggtaattagtctccatttttttgttattgcgccttagatcaataccaaaaacttcataatgtttgggacataagaagctgaatagtttcccttatatgctgaagtgcagtgcatagctctcttttttaatagaatcaattcagtctacttccctcaaatgcaaatccccttaattactaataattggctccatgccagccgggtgagttggtaccttgtcattttatatcttttttacatttaaaaggatgatctcaaaatgaactatccaagtaaggtgatcttgataaataaacatacaactataagtagtgtcacattaacggtaccaaggctctattttcaaatccaaggattgtctgatcttatcaatggcacgtaaaccaagccaagtaattaatgtgtgattaattgattattactaatataaactttaaaatatggatttatttgatttctta

SEQ ID NO: 50886 - DNA, 627 bp, Oryza sativa
taataaatttcttgaaaatcagtaaatcaagatgtaaaagatcgtgtggattctattttggactttgagtttatgggctttctttaagatggaggagcagcatccagttagtttcactgggtcaggcaattttcatctgagttgagattaatcttcagtcaatttttatttctctgtttaatggtcatagaatgacatcgggaaatattacagatttgtgctttccatttaatgatgtttattagaccttttttactgatgacatcttattacactaatgcagacatctttataacatttattgaattcatcattggagctctgcatcatactaataagagtgattttatagttcttgaggaggtaccacattttctaatgtaaaatttggtacctctcggtacatccggtactaggaggtacgaaaatttgcactaaaaattttggtacctctcaaggactgtaaaatttctctactaataaagccacctataacttgtatgatagaagcttttgaaagaaaacccccgcagaaacaacaattacctaagtttcctcttcatataaaatacacttccaaaattcatattagtattctagagcatctagatagctttctgtttccct

SEQ ID NO: 50887 - DNA, 2812 bp, Oryza sativa
attaaggttagactagatgggcctttttggctcataatatgctagtatcaatagtctaacatacatcctccggagacccgcgtgtcgcccgcccctttgccctggctcatgatcggggcccggccccaactccccgcgggttgaaatccacacccgcccctgcccccgtaggggcagatccccggccccacgggggaaattgtcatccctacttctgtcagatcgctcaaagtgtgcttagcttattttttgacgggatcaggtgtgtttaactaatgcttattagtaatatgcccgtactaaacgctacggtgaaattctatgtctttaattaaactttaaaatggattcggatgccgtgaataaaaaagttatatagagtacaagaaaatattttttccgcatgtcacgaattcagatgttccatttcatttttgttatgtgtgctttttgaataaaattaatacaccctgttcggttcacaaatggtaattggttatatccctgaatgaaatccacgatccgctggcaaagatgtaccattctttgttgcaacaaatcatccaaatccaaatctaaatgtaaaaattttgggaatattgtaccattcattattgcaaatttatagtgcttagattacttaaaatttatcaaaggactatgtttagattacaatccaaatgtacaatggactcatacaaaaatatggtctcgggcttaatttgataaaatttcttctatccacatcagcaaaagaacatcagtgcactgtacattgtctatattgtactatacaacaagaagagaccgatccgaatggatgatgctttctggtaatataaacattacatcaacttaacacggtgagtacgtcttgccaagacaacagattgcattttccactggacattaggatatgatacagctgattgcctgattctatgctacaagaccaacaaactgatttccatagcccatcgagttggtcgtaattcttaacacaaggaacgtacaacaacacatggagaaaactgtccaactattttccggtgtccgctgaaggcccaaatctgaaaatgttcaacaagcagcaactcaaatgttaacatgctggagtttgcaccaaattattttcttttgctttcacttctagaacgacatggcaaatgctaaacacaaaactcagtaagttctgctgggatctttataataataaatcaaaatgtccagatgattaagtagtggatgcacattagtggatgaatggaatagtacagtaaactttataataatacaatctacagatgattaaatattccttgtataagttaacaatcacatccacaacaaaaaggcagattgcaaagttaatatggcaccgagatgaatttgcaaaaagaacaacttaagaacaaagtggaaaaggtgattatcacagttctagtgctaccaaagtggaaaagaacaactttattttttttatataaatcaaaatgtacagatgatcaagtagtagatgcacattattggatgaatggaacagtacagtaaaaaggatcacgttgtcgaatgcaatatctcaaagcggtacattgaaaaaaaaagaatccctgatacaggaaagactcccaaccacagaaagtaaacatatgacaagcaaaatagttgaaatggtcctgatccttgcttaaagaagtagcacaattttattccataaatattttctaatgacatggagacatagttcagaaagtcaggtaataacaccaagcagagtgtggtcataggtggtcacacttaattgattcctccatagtatataaatggatctaagtttctaaattacaataaaggacaggacgttggtaatttgaatagtaatttcagtaatcgatgtacgtgcagaacaatagtgcagttatttttaggaaaaatctttatcctgaaagccatgaacacatatctatctcatagtcaaagtgcagtcaagaaaggaaaagaacatttgacattgaagtggtacaaatcaaccagaaaaaaaagtaagagggggaacatactggatgccgacacggtagtgtggatgttgaggaatcgcctctgacctgatggatgccctatagggcgacggcacgccgcagttctggcggcgggagttcctggtggagatcggagacggtgcagagaaaaccggcgacgagcggcggagtggtgcgcgacggcggactggcggtgttcggcggggaagttaggtttagggtttggagagcgatggaggaggcgggaggagcgagaggcagagggggcggggcggcggcgcggtggggagagcaatgcccgcgttgcggtgctgggggaggagagcggaaggatttcgggggtatgggagcggagtgattttaggaaggcgcgtgattcaagagtgctgggtgagggaaggcgacgcgtacgcaggagctaatcggcacgttagattgagataatctggaccgttcagtgaagaataaaagaatgagtgatgagtgaaaagtatttattgaatgaaaaagtccactttgactcccttaattatcggcggaatctaattcgtaaccctcaaccgcaaaaccggataagacgactccccgaattattgaaaccggtgcaatttgactccctcagcggttttggagggcagttttgctgatgtggcactgccatgtcgatgttgaactagtcttcgtctcacgtggcgtttaagtggcattcaaattaaaaaatatatatatgtgggacatgtctgtcattcacacacagaaatagattatggggg

SEQ ID NO: 50888 - DNA, 643 bp, Oryza sativa
ctactgcatgccataagaacctgacgatgtcttgctgagttgctttatcttgaaatcaagggaaagtacgaatgcctttgcctcgtgcttctcttttgcatctatccctttctttctttgcgatttttatttttctttttgaacgaagctatcccttactttgtccaaatgacaaaaaaaaggctttgttggaccatttcaagttctcggtaatcttccgagaaatccaatttcacaagagactacatccagaatcacactagtgtatatatatataactcatatgcataatttggagcacagtaatttgctagaaaaaactgtcaaatcgctctaaacaatctgaagaaatcaacccgcgcgcggatacagagatcaacggccggcaaaaaggtttctcgtcgacgaaaccgccgcggccgccccgaagctatcgggcggcaccgccgcaatgctgcgcgccgcggccgccaccaccgccgggttcctcccgccgcgtctggccgccgagacggcgcccgcggcaagggttgtggcggcggcgggtgccgaggtgaggtcgtcgccgctcctcagggctctaggggtgccgagaggcggcgccggcattgggagcgccacgccggggaggaggatgtacttc

SEQ ID NO: 50889 - DNA, 768 bp, Oryza sativa
ttcctgcagccctgttgaaaccggtgcaatttgactccctcagcggttttggagggcagttttgctgatgtggcactgccatgtcgatgttgaactagtcttcgtctcacgtggcgtttaagtggcattcaaattaaaaaatattatatgtgggacatgtctgtcattcacacacagaaatatattatgggggccatatgtcatcctctctctctttctcttcttttcaccggtctgcaggggcgagagctagacaagcggcggcggcggacaagcggcggcggcaggcaagtgacactagggcggcggcggtcgagggagtggtcggcagcggggccagatcttcctcctccctctctctccctcatccctttctccctagtttgtgtggtcggctggaatggtcggcggcggcgggatgacgacgggacggccggcggctgacgcctccgccatgccgcgcagcagccggccagccttgtcgcggcgcaccgacaagaacgccctcgccacgcacggcgacgacaccaccacgacgccgcaggcgcccatcttgaggtacacatgacaggcccgtacttgcgcactagcgacgcctggtcggcgtgcggggccaggccgacgagcggcagcgcgccgaggacggggacgcccggggtcccgggggaggcggcggccgccgccggggaagggcgggcggtaggagcggagggagaggtggaggaggaggcagaggaaggcggcggagagcacgacgaggcggggcgg

SEQ ID NO: 50890 - DNA, 657 bp, Oryza sativa
tgtgtggaatataggatggactttttgcattgtttgatgtgtgggatatgtgatggacttttggtattgtttgatgtgtgtaatatgtgatggactatgtgaggactatgtgatggatttttggtattgtgatttgtgaaattggaacctgttttagtgtgtaaaaatttgtgaattgtgatttgaaatgcgaactgtaaagtggtagatttgtccaatatggatcttcaatttgcagggaggcagagggcggcgccaaccacctggcaccgcggttgggaagggcggcgccagccagtgccgcgaggcagaagggtttcgggctggggggcgctagctaccctggcgccgtggtccatgagggcggcgccagccgaggcccggaggcagaagggcttcgatggggggaggaggggggcgccagccaccctggcgccgcggtcgggggggcgccagccgttgcctggaggcagaacagacttggcgaaaattttgggggaaggggagaaagttggtggggcccgcagaggaggggcgcgccagccatgctggcgccgtggtatgaggggcggcgccactttggctggcacccccttcggcctagccagcacctccacgacagccctattgccacggtggcacgggcacggcgccagt

SEQ ID NO: 50891 - DNA, 2617 bp, Oryza sativa
tcggctctctctccatctccaccgcgcagacgagcgcaacctagcggtagcgcaggtaggggctcgtcgtctcctctctttcttctcttcttctcccctcggctctctctcaccctcccctcgcctttctcgcgcgtcagtggcggcccagcggtggaggcggtggcggcggcgggaggaaaggcgacgtcccagcggtggcgccctccgcagaaggggaggcgggggcggcggcggcgcctcccctccgccagatctagccgggagcggcgacccggcaggaggggaggcgggcggtggcggagggaaggcgacggcccggcggcggcgaacgggagcggaagcaaaaatcttgtgttcatgtgtgttcctgtgttcatcttttgtgttcatgttgtgttcttgaagtgaaagtaaaattgctcgatgcatcggctcgatgcgtaatggatttgtgcgaattttattccttttctttttctgggattatcggttggtgtagttcttatatttgaaagtgatgattgcttgattgggcttttaatctatctttgattttgtgatttgcccgccgtacgcgattaggattttgaatcgatctctgattcttctgtgcattggccagcgtatgcgatgaactaatacggatacgaatacaaccagggatgacgtacggaaatttgtgacaaaaacatcttaaacttttattataggtaaagataaagataaagattgatcgtctcagagaaagatttgtagtacataataagtaaaaatagatttatctctagaattattttatctctgtgattttaattcatgcgatatattactccacaaatataaaagtttgacgtttgaccatgtccaacgtttgaccgtgtcggatactttatgcatgacttatctttttaattttttcataattttttttaaataagacggacagtcaaacgttggcacggaaatctgcggtttgtctttttttttgggacagagggagtattgaatagtatgccatagttccatatacgaatgactcttgtgtcagctagctggcatggcatgtgaggatttatgttggcccttcttattgtattactattcaacaataaaaaagattgttcggtcagaaacaatgacttacacgtccaattgacaagaaagacggagagaagacgtacgtgactacgtgcatgtggattaggttgcgacattcaacactcgacccagtgttgagagttggccgtgaaccacgcaccgagttggaagaactcatgaacggccatggattgaagtctgaactctgaagactgtcgggcactcgggctacctctgaaactggaagctgaactctcaagtccatactaggattacgtccacgatatgggtcttgggcccaaggcgaaggcccatattgagaagcctagtatccttggatgaacttggcagggatgcccttaaaagtgtgacaccccaaacggcccaatgtccaaaacaacgattgcatcaagcccacatttatgcttctggttagatatgagcatgtggcatcaaagccgatcttagttcttacatacctcactgtttgagtggcggctaatgggcgatccatcgcccagcgatcgcatccccccgcctccccaatacgcgaccccagtcctcccacttcttcccttcctcctctccttcttctcttcctagtgcagtaaaccaaaaaaatttttaaaaaaaacaaatagttagaaaaatttatgtatagaaacactatatataaaaaatttgaattcaaatttgaatttgaattcaatttgaattttcaaattcaaatttaaatttgaattcaaattcaaatttgaatcgggtatgtaaacttttaacttataaactttggatctataaaatatttgaattcaaattcaaatttgaatcgggtatataaactttagttctataaactttggatctataaactttagatgtatatagaaaatataattcaaattcaaatttgaatcggatataatttaaattcaaatttgaatcggatataatttaaattcaaatttaaatcagatataattcaaattcaaatctaaatcgggtatataaacttttgacttacaaactttagttctataaactttaggtgtataaaatttagatgtataaaatttagatgtatagaaatattatatataaaaaatatttgaaatcaaatttaaatttaaatcagatatataaacttttggtctctaaacttttgatgtgtaaacttgaggtatataaactttaggtgcataaatctataactaatataaatatttgtatttttccagtcgtcacatctttcaccccgcacctttttttttcgtccgtaaccccttttttccatccgtaacccttttcacaccgtgttttccgttttcccaccgctccagtttgcgcgtattacacacgaaaaaaaaatcccataccgattcctactcaaatttaccagattaagcccacaagcccaaattaaaaaagaacgcatctactaaaaagagcccctgcaccgattcctactccaattttatcccgattttatgttgagtcatgctattaatattacatg

SEQ ID NO: 50892 - DNA, 690 bp, Oryza sativa
gagcaatctgatgttgaatttgctgaagactctgatgatgaccgtccattccctccacttactaataatgacaagttagcattagaggaatgtcgtgcatttgagaaggtgtttgggaggaagccggacattcctgagtttagggacctaacacatgcccatggtgcactactagatggcggcatcaacctagatcagttgccagaaccattccaggtggatggtctcagaaagggtttagagttcccatccatggtcgcattgaagctatggctccaggagtacgccatcgtgcaccatcgtccataccgtgttgtcaattctgccgcaaataggaggtacactgttaaatgtgaaaacccacggtgcaaatggaaggtccatgcaactaagaggtctagtggcacgtggaggatatcacgggtaggtaaggaacatagttgtgctactgccgaaggttcagggagccaccggcaactgacatcaaagttcatagcaaataggttatgcaatgccataaaactgcaacctacactctctgcttctgcgttagctttgtatatatttgaggttttccagtatagggtgaagtatggcaaggcttggagggcacgagaggaggcaattaaactcatttacggtgaatggggtgaagcgtatgtccgtttgcccactttgctgcaagccatt

SEQ ID NO: 50893 - DNA, 1962 bp, Oryza sativa
gcaccctactttaccattgcgggtgctctaataaccgaaataaacgcgaaagctatagttttgacattcctaccctttgcaaaacctcatttcacgatctgacatttgccagctgggaacatgtcatattactgtagtaaggctgggttactttgatgaaaaaaaaaccttaccaaatcatagctgtcaaaattttgagaggattttttatatagttaccaaaatttgacatcaaactaaatatagttattttttttaactttatcaaaatttggtaaggttaaaaatgatatcaaagtaaatatgctctaagtttgcccagagtattacttgtaagagagtcgcaataccaaaattccaggcatgaaaaaaaaaagaaagaaaaggagaggaaaaaaaagagacgatgtcctaccgaaaatggaccgtacagtggtgagcagtagtaaaagcgaatttcacagagaatcccatgtgggccagccagtggacacctttcacgtcttttcttgctgtttactccactgaccccaccctgccgggaaggaatctcacgcgtttcacacccgcacacatcatacgacagcgtggacccacacattctggtccactgtaagtgagacaaggtgctcattttgtagtcaagtcaggttaatctttgcaccgggatgggtagaaatcacggtgcattttttttaaccttttgttttttaccttgcaattttttaacggggaggtagaagtacccgcagataggacgatgtggtcagtggtgcacggggagacgagattgaccgcattaaatgagctagcaagtgtgatgtggtactacactgtagagtagggctgctgcttccgttggatgaactgcacacaaacatgtgctttgatctgagtagactttggcttttttatccgttcttaatacttcgtcataaattatagtataatgagatatattatagtgaaatgtatcttaatatatatatatatatatatatatatatatatatatatatatatataggacactcatatggggcaccatggtttcaaatgcacaaaatcactcaaaattttcaaaattttcaaattgtgagtatatacctagttataagaattcgattcatacctatacctatcaacaaaacaactcaaatttaactttatttcacaatccatgattacatacctaactaattatatgtatggatgctatatacctagaatcaaaatctaacaaaaacaagttcaaattcagttcaaacttgctttcaactagttagtaaagtagttaatattaatacctaaataattgaaaaagtttcatgctcatttgaattgggtatatactcaatttcaacaatggtgcccgggcaccatggagcaccaaacaaatttacatatatatatatatatataatttaattttatagtattataattatgttacgatattttcagatggatggtatcagatttgttgtactaagaaatatctcattcatccaaaatctcttttattttaagacagagggagtactttactatacaatgttttaaaaggataaaactttttaaaccaaggtactctctctccgtccataaaaaaaactagaactgatatgatatattctactggacgtgacatattttaatacaacgaatctgaacagaagtagatctactccatccgtgccaaatataacaacttttagcacacataatttattctaaaatataataatttttttaccaacattctctgcccaacccattacaaccctccgtcatttatttttctcacctacctacctacttttttaataaccgtgtcaactataaaactttttatgttctgaaaaggaggtagatttatagtactagaatatatcacattcagtactagattgatttttaacgagacggatggagtagttcttccccgtacggttgctatct

SEQ ID NO: 50894 - DNA, 1738 bp, Oryza sativa
atttatatgtagacatttaatttagtgaattttcatcctatatagcccaattttttttttgatttcttagttccaaaagatatatgtaccgctaaattactagtcatgtgatctggatatctgacaatggtattgttgttgcttgcatttcctatagctctaatgatcaccggttaacgttgttgacgcctgaaaatcatcattggcgtagctgaggagggtggcgtggtgtttccgtggacaatgttggggatcttcaagttatgtcctggatcgatggagcttaagaatgtttgtgaagcaactcaagatatggagattgtgcatctgtacatgtccttttatgtaccaactcgcaactcccactgttatatcttcctaaatcatcttagcttctgatcaacaattcaattcaaataggtttcatggatccattatacaaatttcctagtgtcattctaaagcgcagaaccgttaataatttttactatttgtgtgcatccaactgaaccatgtaatcatatatcatttcttatattagaatcctgaaatgtttgttttgattttgccttcagtttttttttccatattttggactattgtcatagttaagtttattggaaatgcttggctatgtacatatagtttggatgtagaggctaggttttaatccattttctaaaaaacatatattggaaattctaaattaaaatttatgtatgtatgtatgtgtgtgtgtgtgtgtctatatatagagacacacacacgacctgaacacggttttcgtatttccctgacattttgtctaccttgcggagatgatggcagatacacatacacgacctgaactgtgctgcgagcaaatgtgtgaaacatgaagaatccagggtgttgcaaaattctcactgaagaacagttacagacaagccaacgaagacctgaacatgagatgtcagtggagtgccgctcgatcatcgcttgtgccagaattttgcgcttcagcagcctttaatcgatcgatccccattcctcatcccaaacactaattccccattctgaggttgcagccgcgcgccgccgggaagtgagagggatcagcttaattaattaactcgaggatgagatttaatttgtgagtgcaattaattatcaagcttatgcaatatacatttttgtttttacaaagcaacataatatgtgggctagacatttattgagtgatctttatatgtagacatttaatttagtgatttttcatccgaatatatatatatatatatatatatatatatatatatatatatatatatatatatatatgccaaaaaattgatttcttagtgcaatcagtgtaagcagtgttttgatatatgcaaatttgcctatgttcctaaataaacacatattttgaattaattactagtcactaattccattttcctgtatgcatttattttttctgtgagctcagattcatatgtgcattttgtgttaccaaccttttcggccatgatcaaataagacatgcaccttgtatgtggactagtcatatacgtactgcaggatatcttttattggatgtatgtctaagttttgaagtgaccaagtgttagtacagatttatcttccactgcagtttcttagcattcgggtttgctgtatatttagtgcaacaaccatatagctagctagctaggggcaaacatataaaaaaagttcaagtctctatattataggg

SEQ ID NO: 50895 - DNA, 1029 bp, Oryza sativa
atttttcttgttctaattatttgaggtgtggggcagcatatgagttattctgatcattgttcaccaaattttgcatagtctttctgcatatgtagttgctacaataggacttcacaaactgcatatgtgtttcaatacattaggttttcctaaatataaaatacatatttatttaaactatttgttagctagtcgtcaattccattttcctctctgcattttatggttggccacagcagattatacatacaattaagttcatcaactaatgtatatttttattacaacgtcttgagctgagctaataagcaagacctatgcaagcatgtgggatatataatataatacaacaggaaaacaccttcgaaatatgaactgccaagtgcatcttgaaaattattcaaacagaaatttagtttattcaatagctttgttactcaagtgataactagaattgaattcgtgcttttatacatactgaatttaacaaactgcagataattaatcttagttatttattatagcaaaaaaactggatgtatatgcagacataatagttagcaaaaaatcttgtaagatagacttgaattatagtctgacgatgcattttatatgttgacctgcgccttcatatattcttcaattcttttagtttatttagttaccagttccccaattcaagatagacttaagaagtttcgggcaaagaaatgacgttttcattagcaacacaccatcatttcactatgtcattttttgtaaaaatatttacatcaagttgtatttggagaaattatttttctggaacaacagtaaatgtgtggactttgggatcagtttttataattgataattgatgatagttatatatcttattaattattatacaccggggcatcaagattgggcgtacattcaggatgtctcgatcggcgtggctagctactaataatcaggctatcgcacattcagtcaatgagatctttatatgtagacatttaatttagtgatttttcatccaaatatata

SEQ ID NO: 50896 - DNA, 734 bp, Oryza sativa
ccaaagacaaggatggagatttaaaatggtttgcttttattttaattgattaaatgaactttgtaactttaaaattatgtcttgagctctgaaaattcgtggaaaaatccagagagtacattagggcacagagaatattacaaaatattttcggccatgatttttaaaggaaatttttaattccctcactatgtcacttgattaaattgatttaatttttaatataatttctggaaatgcattattaattgatttttaatcccgaccgaaaattggggcgttataatgtttcattggtcgtaattatccaactaaaatgcgactgaatggtgggttgtgggtgcatggttttgctagtcgcacctatagcaattaaggaccagttcacgggaaaccctggaagacatacaacgcttaccacaagcgggagtgggtaattgcttgatctgtagtatagctcgaccctgttgatgaccaaatttggtaaatcatgcatcaaattcaaagctaaagtcgaagcggatttgataggagatcgtttctcataaacagagtacgtgtcggctacgggggcacgtcggctaacgtctgcatcggctgacattggatcggacaaagaactgagcttctataatatgatcaaagttgtttgcacttgattttggcccaaagttttttacataagatcaagtgaacacaacttttgggcaaaatgtatatgctcaatcagctat

SEQ ID NO: 50897 - DNA, 569 bp, Oryza sativa
  unsure (1)..(569): unsure at all n locations
agcatcagccatgccgagaagaagacgagaggcggatgcagaggacgcctctccattgcatctcatccggatgcacagcacgttctatcttctcgtctccaaggtagatcaggggcagtatcaggatgtatcgatttcttattgttcgataggaagatcgaatcagggccagtcctgacattttggaggcccttttgcagacttgacgctatgggccttggagttagcccttaaggagttatatctattttttttacttctaatacatacagtatactctataaagcacatataccatagagtgacacaaataaacatttttaacacggtaaataataaatcaagcagtttgcaagttgcgatagagcaatttaatctttaataaataatatcaatagtataattgacaactaaaaataccatagaaacaaattagtatgaacaccttaataggagaccacaaatatcccatgtcccttataaaaaagagccttttcgcgaccttatgagttatgtatagcacccgacaaatgtntctaggtaatattgtaacacctgaagcagtgaaa

SEQ ID NO: 50898 - DNA, 1616 bp, Oryza sativa
catatacatgcatcctcttgatctccagcttatgccctcgctcgaaaatcatgcctgccatatttgatatatctgaatcagtatcagttactaaaagatattcccattttcgctgaatctacttgtcattgctgtctgaagattagcagtatacgctttggcgtctgcatgtgagattgactcgttttgcttgtaaccatatggggctgtgattctgtgaagattactttgagagaagagtaaaacagccacgtgaccacagagtttggctttgggatatgagtgaaagaaagattattgtggggaccttcaaagctttgggggtaaaaagctttctttagggtaatgctactttctccgtttcatattataagactttctagcattgttcacattcatatatatgttaatgaatctagacatgtatatctatatgaatgtaggcaatgctagaaagtcttataacttgaaaaggaggtagtacaattgtagaggcctccaatttcaatatgtccatccaaatttacctagaaaagaaaaacgtgcttggtataaagaatctggggtacattgcctatacaaattctcgtgttgctatagcaaccatcagtatgaccttttgcattcattcaatgaatgtcgatgcaggaacatgttccatgaaccgaagtgagagctagtattacagaaaagaaaagacaaatattgtgtccagactccaggctgaactctagctttaactcgagatcacttggattctcagtgtgatcaatctgacatgcagcaaccccgatatatgaccacatatgaaggtttatacataacaaaggtagaggaaaatagtgaagtctactgactgccatagtcgccaccttatacgcatgatgcgatcatcagagctctatcctgattcacttgttaacagccacccacatttttaggccatcaggtgtgcatgtggcttaaatctatctcagattagcactattgattcgagtttcactctagtaattcccaacactatgctttattatgacaaaacagctaaagattggggtgcatcgatgatttcagtaggaactgttgttttgtagcctgtgtcaatgtctaactatccatgtagctaattgtgccaaactctgttcccagagagaatctgccaagagtgaagggctaacaatcccttttgataaacacaagtaattcaatccccttaggcacccccaccaaatgaggtcattctaatgttttatatcaaattacccgcgtaaagaattcgatcctgtgaatacaacaggccctatatgacaaaatgcatagggtacagaataatagaacatgtcacatggatggaagagtttcttactgtttctgatggagtgatggtaccattgaagctcttcaatatctcagcactgcagtaactttacttacagtgcacacggaacactagggcagcattctttgagaacaggaccatttacagtattttgctatgtcctgagtaaacagcatgttacaaattagaaaaaaaaaaaagatagggaattcaaagatagacacaggattttctctaggacaggaattaataattaaaaatgatttacctgatgcga

SEQ ID NO: 50899 - DNA, 1618 bp, Oryza sativa
atcgatggcatggcaatcatctagagtatttcctttgaggagaaggaagagtggatgtctaagattgagtctagacaagggtttcactctaagggcaattgtgacattttcttagcgatcttgggctataattctataaacagagaggtggatgcaatgatggagtgtgcctttggtaatagtggatgcaacggtagagtgtgcctttggcaatcttttgagtggttttttgagagagttttgggtgagttatgcgtgtgttgcctttggggcttttttgtgtttaaatttacatttaagtggtgtatgtttgctcctcttgagcggttgtacttctgatccttcagttacttccctctaaatgtttttggaaaaagcatataagtgaaacatctttggtaaaattataaaactaaaaagaaaaatgaaacaaagataaaatatataatcacgcaaaccagaaagacaatatttttaaaataaccaaaaagtacatttttaaagtaatcctaaagttatatgtgaagagaaatagaaaacatgtttttatgttttttcaactagtagtttttatctttattcttcagtaacttaatttgagcatataactgaaaggaaaatgaaaaaaagttaaaatagataagcacgcaaaccacaaagataacatttataaagtaactcaaaagttatatgtgaagagaaatagcaaacctattttgttaagttggtagtaatctaggggaagtatacttctctggaacactatttatgataaaatttctgaattgcaagttgatagtaatcgaggggaagtatacaatagttagtgtgaaattaccatctaatgtaccatcattctcaatttcataaaaatatcgatgcatatggagaaacgacagcttaatgttatcttccttaatgcatttagagttatccaaaaaaaaaaattcaaatcttcgtccaatttattgttagcatattgctcaaagtatgtattgtttacttgctgctttgacaacttagtaatgaaaacaagatcaattagcaacaagataattagttaatgtaaataataatgacaggtttttaacgaatccaacatacatacatgcatataatatactccctccattttaaaatgtaaaatgtatgacgccgttaactttttgcataacgtttaaccattcatattatttaaaaatttagtataaatatgtaaaatataagttaagattatattttatttaatgataaagcaagtcataatgaaatagatcatatttatatagttttttaataaaatgaatgatcaaacgttgtacatacattttaaaatggagatagtatttgtttatatctggagtacctttagtacttgatgcgataaagcgcatggcggattaagaggtcctgaatttgatcatcatcagtgagttgggtatcatcatgaggacgaggaggctggcgttcgtctggcgtggcaactgatagaagtaggtatcatcatgagaacgaggaggctggcgtggtagctgatagaagtaattgaggaattcttcgtcaatgatgctctccaccaaaccaaactcgttcagctcttggatcatacgctctgatt

SEQ ID NO: 50900 - DNA, 1095 bp, Oryza sativa
ttgtgaatgctgttgtgaaactgggttcgatgtttgaaaaatcagcagctgacgggatcagctaggcccgggtggccgtttgaaatgttgttggcccgggtggccgtttgaaaagctgttggccgggtgccaacctgtttcaagatctaaagactgatacattgcacatactccgaccggacgagatgcactgtctcatccgtgtcgtttgagaagcactcacttagactttttagaaaagagttcaaacaaaatcaattacgaaaaaaacagcctttccttgaagcctgcattaaacacttatttcccctggcttgctgagtactcccgtactcacccttgctctatataaataatcctcccccagttgctgaagaagatgaagtggatcctgctgacgaggagttcttccaggagcaagtcggctacgatgagttttagggtttcggcctagttcccaagtcgcgcctgtgatgattggtccaagtcctggcttccgctttccttttgtaatgcagttgtgagctcgggatctgtccgcagcccaatatgactgtacttctactctataataaagagacctctgttactgtgatactctgtctccctgtgataccagcactatttcctgggactggtatcgattaatgtcacaccccgaagttttcctcccaagccaaattgtaaattacaaatgaccccaagaaaatgcagaggaaatcaggataaaaccctaagaaaacaatgcatataataatcggatttgacatgtggaatttttcttgaattctacatgtcgaaatgcattaacaggatttttagtggaattttcagagctctagaaataattttaaccaattaaaaatcactaaagtgcaatttttaattccagggaaaaccctttttccttttcctttttctttttcttttccctccctttttcctcctttttcttttcggatgggccgacggcccattcccctccttcctccccctcctccttgctgggccggccgcaggccgagggcccagcctggcagccgccccccgcctcccttctcggggtcgcagacaggtggggcccacctgtcgggt

SEQ ID NO: 50901 - DNA, 678 bp, Oryza sativa
tttatggcaattatgtcagaaagaagatggacattgccattgattccacggtacaaaattgattttgttgataactgactgtgaatccaaattaagatatacaggctgacaactagggatgaaaacggtacaaaaacggatagaaactacctttatcattttcgttttcattttttttttcagaatcggataccccggatacgaaaacggaatcaaatattgtcgaaaccgaaaacggcgctgatacggtaacgaaaatttatcggaatacaaaagcccctcaaactaagctttaaactatgtcaaatccaattctcaagtctcaaatttcaacattacattacaaaacacaatcatgtcaagtccaattctcaagtttgaattgggtgtattgggttggactgaattgagtgactcaggggatgctgaattgggttggggtggggaggaattatagactatggtatgggcctttataattccaaaaattccgagaaatttttcggaaagcttccgaccgattttgagttccgacggaaactgcccttatcatattcgattccgtttccgagaaaatagttccgaatccgttttcgtttccaaaaaatttccgaccgacagattccgttttcgaaaataggtccggaaccggaaagtttccgtactgtttttatctat

SEQ ID NO: 50902 - DNA, 535 bp, Oryza sativa
atatatactcctcctgctgctgttttatgtcaatcatgcaaattctgtacccttgctgctgctgttttttaaatttgcatgattgattcagtggttatatacctctacacttgttctttttttatgcataaaaacagattttctgcacttgctcttttgatgttatgattttctctttttatcccttcatgccaatgattgtaattgatgcatatttctcaacaaaactgaggccatatctttcatagtataccccgtattacattggatctaatgctatttaatctaatgggaggaaatttataatctttttcgggaaagttaaaccatgttaacgcccggggcaaacccgccctccccaacacctgcgaggatccaggaagaagcaaacccagccacagaggcggttgccgaaggtcatcccgcgaccacggggggccaacaacccgaaattcatggtaatttataggataaattttcaccacataaccacataaattttagctagcaccccttagcaaatattgccttctgt

SEQ ID NO: 50903 - DNA, 710 bp, Oryza sativa
caaaaaatctggtcagctcacttgtctttcatttgtcaaaaagttaatcaactgtcgcctcacaattagggcaaagctaaacttgtctgcacaaacaccaacaatatggttgctaaagataacaccaaactttatgtagttactccataaaaatactccaaactgggagtagcactatctagtctcgtctgttatgtcccgaaacttttcatcaacgaaccttttagtggagaggttgggaacctctttcttagtcaccgaaaacggtgttacccattagcgtgtaatgaattaagtaatagtctaaaaaaaatttaaaaataaattaatatgttttctaaaataatttctatagaattttttttaaaaaatgtaccgtttaacggtttgaaaaacgagcgcacgaaaaacaaagggtgaagatgggaaagtaaggaaaagaaaacaatctcaaagttagacctcaaagtgagtctctataaacatcagatcagtagtatacacagcagggagtgagctggttattgcacaactaatgttttaccactccgaacaaagtattggcaatttctgacgagatgaacaacaagtacagtactaactagggcacgtaccacaccaactctgcaattattatcaagattgaagggacaaatggaatcgcggatctctactttgaaagaaccatgtaaaaatgtcggagtccgaaa

SEQ ID NO: 50904 - DNA, 653 bp, Oryza sativa
tgatcgacccaaacaattcttagaaacagaatatattggcttggatagtctcggatttggaaacaaattcagaagtgctaagttaacacgatgtattataaattagcgtaagaaaatacggtaaataccacgtagtttcacctcaagcgtgtaaaatggattgtttgcagaagtgtcggctgtaactctgttcttgacttcttgttggacaggaagtgccaatgtacgtatcatgcacgggtagtggccagacacttcattatggatgtgtttggttgcacgggtagtggcctaacccagttctcgactgagtttggtccagataaaacagaaaatctatagaactacataccgtttgaacggagtagagtaatgatcaacgccctacaccttatcttcttgactcgtctatgcagcgtcgtccaccacccaccacgcacaagttactccctccatcctctgtccccctctctacgcccacgaccactagccgctggccaccgggagccgttttctcgccgcatcgaccgtaacaccatctgagccggccatcggcgatgtccccagcaattcaacatgagtgcaacaatggcagagcctgcatggggttagatgtccacaggaagaaggaagaatatgaggatatggctttt

SEQ ID NO: 50905 - DNA, 633 bp, Oryza sativa
ctgcagcccaattcaaaccaacaaaaagtttgcccaaaaatccccaaactttccaaaggccaatccacactacacagtgccatgtaccggtacccagcctctctctccctccctccctgtgcaggctgtgtgcagcagccttgaccagaaccgggccagaccggatcacttccttctggtccctgtcgggtcggtcccctcctccctctccctctctctctccaccgcgccggcccggttcgactcgaccacaacacgcgacgccacgcctcctcccgatccgctccggccgcgccgcctatgtaggcctctgggtccattcacaccgcctcttttcgtttcgtttcgccgcccgcttccgccgcgcgcgcgcacgtgcgagaggggagagggggatagcgacgccgcgcccaaaccctactactactcctcctcctcctccgcgtcctcgccggccactcgtcgccggcctccgtcgccgcctccgcctggttatccaccagaaggtaggcgccgacctcctcctcctctttctccttctcgagcctacgcgggcgagggttccgaggtgtgcgagtgtggtctcgtctccctcccggagacgcgtgctccggtgggtgggaaggatggtgt

SEQ ID NO: 50906 - DNA, 535 bp, Oryza sativa
gggggggggggccgggtgacagcgagtgggcggtcaacagaggagagggagagagtaggcacgatcggatcggacggcctaggaagaatgaaagccccgaattgtgggcgcagggtagcgatctcgccggagtggcatgtcgcgggagtcccgttccggaatgtggtgaacagtgacaacggccatccctctactggttgagctcctcgatctccatctctacagtgacagtctagtactagtagtatacaactacatgcgacttgcacatctctgatctctcttgctgccttgtgtctttttttttcttctcccggatgacttgtgtgtatgtgcatgctgagactaggccagtacaccccaaaattttacactccatcacatcgaacgtttgaacatatgtatgcatgaagtattaaatataggctaaagaaataactaattgcacagattacgactactttgcgatacaaatctttgacaatgcggtgctacagtaaacatatactaataacggattaattaggcttaataa

SEQ ID NO: 50907 - DNA, 1224 bp, Oryza sativa
gcccaaagggagcacaaacgcgggccgcgccccgggttgcgccgaaccctgggggctcggaagggcctacactcggccgtccccgaccccttgtcgttgtagccccggtctggcaagtcccgctgggcggcttcctcagggcgtcggttttgcctttcaccacttaggtaccacggaccgagcgcgggtttgccttttcgctagaacaagcccgagggggggggggaggatggggtaaaagcggcatttcgatcacaggcagattaattatatacttttgctcttgttttttcctctttctatgccgcaggcattcaatggaaaaagcaaaggggtaaaaagtgcgaaaaggaagttttaattgcagaacaagacaggaagacacgatggcctaaatacaagaagtgtctgctacaggcacacaacaatgggaaattgaaagcgcgggtaatcacggagtgctcgggcccccgaggccggtgccgctaacgacgttgtaatgccccgatttttgttcgggaataaaaatcaattaataatgcattttctagaaattaaataaaagttaaatcaatttaatcaagtgaaattatagaggaaattaaaaatttcctttaaaaatcattggccggaaatattttgtaatattctctttgccctaaaatactctccggatttttcagcaaattttcggagctcaaggagtaattataataatacaaagttcatttaaaccaattaaattaaatgaaaaacaaataaaatccctcccctccttccttgggctcagcccaatcccttccccctccttccccggccaggccggccttccccctccattcttgggccgtcggcctgttcccctttccccttgtaaaagtccgcttcacgtcctcctcagcctcctctctctcactccggccgacaagtaggaccgcagggcccactcgtcagcttctccccctacctccatccggccggctgaaactgccatggccgctggttccgccccacgacgccgcgcctcccgcgccccaccccgtcccgtgagcgcgtggactcaatccccacctcctcttcccccactctccccacggaatcggcaccgaaccgctgccaccacccccacgtctagctccacgtctccggccggtttccacctctctcaggctcaatcccgccttccctcccatcttcccctcatccgtttcctccatttttccc

SEQ ID NO: 50908 - DNA, 1030 bp, Oryza sativa
gacatgccatgtcaccttcctatgcaaaatctatatgatttgtccaatttacccttacgcattggaaaataaaaaacaaaaggaaaaagttaaaaaaatatatggtatatgcaagacaaaaatatacctcaaaatatgtgaaaaaagaagtattttttcctatgattatgtctaattcacccttatatttatttttatatgatatacgtaagggtaaattggacaattcattatagattttgcatgaatgatgacatggcatatccatatgatggttttggtggacccaaggactattttaggctttatgataaaggttaaggatttctttggaccatttaaaaggtagggagtaaactgatcctacagagaaactttagggactaaagtagctattctctctaaaaattacatacaaattaaatttatgtagttaaggtcttatttcaaacaaatatttatttcaaagaaaacaaccgaacatgcaataaaaaaaagaaagaaaaattagattcaaacaatgttctttgttgcactaccaagccaagcaattatgcaggtgttttatttgcgctggaaccctttattataactatggagaaaatattgttgaacttatatagaggataaaaaatctaacttaattttaatcaacccttgatttgtttgttacgtaccttcacgaggcgattcaatcacacgaaagttgagttccttgattttgtaatttttgcttctagccatatttatatggcatgtgtacaaatggtatataggataattagctagcggtagtataatatttactcgatacaagagttgtgtgaacttaatctatcttttattcaaaagtcaataaatggtttttgagatatgctaaaaaaaatagaaccctcgatatactttaaagaagtacattctccgactacatataagacttgaacaaactaaaatgtttcccttcaacaatataaatgcccacacttaggctcatgccaccattcctattaccacaacatatcatccaaaa

SEQ ID NO: 50909 - DNA, 1491 bp, Oryza sativa
cacttatatgtgagtcattagagctagcttttaaaaaccaatatcattatgtgagacatcacagtgggtttttaaagaaaaccagtattgacagatcgaaccgagctggtaggaggcaggggtcggttttatcttccaccaaatcctcttcttattgcttcccccacccttttatcttctcgatccatccacatcttcttctcttctcttcttctcccgtgcgagggtgtgcccccctatcaggggtgggtggcctccgatttagggcgtgcagcgagcagctttccccacagcaagggcacggcttgcacaacacgatgcgtggcagacaacctccccatggtagctcgatgtgctcgaggccctgctcgtattccactctagtcgccctgcctccttccctcgccgtgagctctaggtcatctagatatacctgccacgaggtcggtagaggctagatccagccgccacgagctcaaggcgtggctagatctggctaagggggagtggtggttgggggattcgacaacagacaacgcactagatgacgtgtggcagtggcaacgctcaacgcacaagtgggaggacttcatcacggcaagcagtggcaacggcggtgacattctcttcctagatatatgtgttcttagatgctaacttatacatgtttgattacgtaactttgtcgtttgattatcttgaaaacctttcgatctcatggtctctatgctgttgttggatggatggttgatatgttcttgaaaccattcaataatagatgttgactaatgtattcttggatgtgcgatgctttgggataatagggagctaccttattcatctgctcaaatccagccgaaataatgaggattcatagaacctcggggtgcctgttactaaatcaacacctatgttttctcattagttccgtctcaattgtgccggttgaaaaacaaacacctatgtgggggtttccgatcgacatctatagtgttctatttacaagtgtgtttgggaagtttggttccaattcttaatcggaatatacgctccatctgtttttttttctctgatcaatgatcgatcaggccttctctgactgacgatacttctacaccattgttgagcacaactaaatcaagttttctgcacacgttaagcgcaattaaattctctttagggcaacggaccaccgctagatggtgtggtgttggtgactatgctggtgcgatggttggtggtagagatggtgctacaactatggttcaggtttatcgttttgaggattatatcagggtattgataagatcataattttgtttatttcggtccgaaattatttgattttttaacaaaatttagtgaaattttacaaatattaccaaattgactaaaaaattaaaatcaaaaattaaaaattatggccgaaataatattgtacggggtccaatagaaatttcggaagtttttagtccgaaatttgaaccctgg

SEQ ID NO: 50910 - DNA, 659 bp, Oryza sativa
cctgcagcccagtgtagtccatggacggaaccgacctagacaccaaaattctccatgcattttgttttcgtcattctttgatgattaaggaactttgcagattatctaaacttgtggatttatataccctttttgtctatgaataggtgaattgcatgaattgttctttatatacatgattatatacccttgatgctgctgccacataaatgattgtgggctgttttattatctacacttgattgaattgaatggatgaattgctgtttacatgaagttagtagtactgtctcattttttttgatgaaatatatgcatatttgagatgtgaaatatatgaggtgatgaatttggactatttgtggatgaaatatatgcagtattagatgaattagtctttttgtattagatgattttaggattaattttgctgcattggttgaattttgcatgattttaactagataaatggccagtgatgttttatgttaatacacccctattgttgctgcccttgtgagtatctttgcccctgttgctgctgcccaatgtgttccttgttaaatggccagtgatgaattgctcaataagaacaaattatctacacttggtttttttttatgcacaaaaacagattttctgcacttgctcttttttct

SEQ ID NO: 50911 - DNA, 1525 bp, Oryza sativa
catatttgaattactatctcatattaaaatatagctatattatcttaaggtagttatatttttagatagcgggtgtagtttttcactagaactacaaatctatatgatgagtagggtgcgatggcatattgttatatatcgtctatatttgtatatttgtaaggaacgcatcaacagtgatgatcactattcgatgcatgcctagctatggttttctttgttatgttttttcacataaaaagtacattgtctatgtcattcacctatagtttcataataagaatcacttcatccagcgttgggctcatggtgactcgccgtcaccaagtccgcctatataaacaacatatatggattgcttatacggatgaactgcatttatacctaggaaaaatatgtagtggaaactaaaaactatcgctgtatctaaaaatgaacgcatgagatttgtccacgtcaactagagtaaaaattttactcccagcattactttggttgacgtggataaaactcatatgtctatttttagatctaacgaccgttttcagatttttagtgtatacgtggtttgcactacatatttttcatagattttcaggacctactctttgttgcttacatgtaaaaacagagtatgtccattgaggcacttcgtgcaatgcaaatctatatttcgtctcagtggtttagtaatgaaatcaatatttttttatattctattgtactagttctcggaaccgtcgatagctttgaacctgagattacaattccggaacgaaattctgaaacttcggtaatttcgcccccaccggcaagcacatatttcacacgaaagtttccgattatcttttttcagtttttgtgaattggtttaaaatttattcaaattcattcaaaattcgtcaaactttcaaaaaataattagggaaagaagtactgaaattccaaaaatttcggaaaccctgcttcgaaccaaaaaaatatctgctccattaggaagtccgattccggggctaaatcggaatgttcagttctaatccgatcagtccctcgttcttctccgactgttaatcggactcgaaccaaacagttcccacgcgccatatagcctcgccatccatgatccatccatggcgacgcacacccaccaatcgaaacctgtagaagaacccatggctgcagctacgcaagatcacctcccttcttctccggccggccccgccgccgaccaaccacagggcggcgggcgtacatccgccttgtcatagagcagctgctatccgcgacaccgccagcgacaccggccgcatccgcctcctgctccggcgacgcccccgcggcgtcgtcgccgccagcttccccgcggccgtcacggcggcgctcgacgacctggaggcgctctactccgaggggagcgcgccgatggcggcgctggcgcgcgacgcggcgcggtcgaggcgggcggggcacgaggagcggctgcgccgcgccgcgtcccagcgcctcgctgtcgagggcccgatcc

SEQ ID NO: 50912 - DNA, 2461 bp, Oryza sativa
ttagtgttggcctcaaggtggatgtgggtcccgaatgtactttttatgttggcatttaaatatagtcaatatgaatatatgatttcactaaaaatataatagttcaaatagatcataagttgaatatatgatttgaaaagttataattatttttatttatattgtttctattagttctaagaggagaaagagaagaatagggacagtgggatacctggctagaccttatatgtggagggttcatttgtggttttttctccataaagataattttaattttaattatcataaataaacataaaaataagagaaaaggaacgatacacaccgcacggggagagagagagagggagagggtgttttttcataaaaaaagattgatctaacaacctaaaataatgtgttggatgtttaagcgaaactaatggtcggatgttttgcttttcctcacataattttgtacgatttttttaacttaagagagacccctagtgtgtccctgggtggtttagaaacatttataagatggttaatatgttttgacgccgcatgggagcgcggaggaagatttgggatgtttttttgttgaaaaagatcgatctaataacctaaaataatgtaaatcgattgtcgaatgttttattttttttaagatttcctctaatttaagagtgctatatattccctccgttccataaaaactcaaattagaatatgatatgacatatttaagaacaacgaatctggaaatgtatttacaaatatttgtatgatgttgaattttattaggagagtatatatgaagaggtggctaaatataatatgttgatgggctttttaagcccataaaaaagtatttaactttaattgttatggggattatagaaaaaagagaggaacggtggttggagccttgcggggattgtacgtacgtgcgcatgaaggttgacatccggactccggacggagattttttttccacgtgaaataaatctaacgataaaaattaatgggcccatcaatttaaatgaaaattaatggtcagatttttactattttattagagtgtcacatggtgactcgagagcgtttataggataccacatggcaacctaggagtgtttgtagaaagtttaattgattttagtatataatagatagatataatagatgtacgtttgaccatttatcttattcgaaaactatatcttttaatctattctatgactaaaggcacttatgtacgttttatttatttttaatttatacatcttttaaataagacaaatgatctacatggtataaaatcaaaaatacatatctccgttgtaggtctacatgttggcgcgctcatgttgtggtggtgatgtctgcgtcgcttatcttccctgttaccatcaatgaagacgaggcaactattgttgtgttcatcacatctaaaagctcgttgtcatcaccatcgccgtacgtgcccctccgaagcatgtcaccatcgccaccgctattcctgtggtccctgacatcgttgctggaccgtacccatggaggctcgaatgcatgggtatgttgtgttcagtacatataagggccggatcagcataactttagatctttggatctgaatatttgattacgtcaataatatttacataaattattttatttctattttagatgaaatgtgaaattttaaaccactgcaatgtgactacaaacttgaaatgcagcgcgtatttgaaatctacaactatatctgtcggaggtatgggcccagaggtatgcgaagtgagggaaagttacctttctatccagccgcgtggctctacagcctggccctactcccacgcctcgcgagtcacagaagtggccggggggcctcggggtgccacgtcgtgcccctcaggctctcccgctgcctcgccccgaggccctcgcccagctgccatatggcggggggagcgagcaggaagggggcccaggctgaacaaccatcaatgcgcagcgccccaactgtccctcaccgcatttaatgcggtaagggcagacgtgcggtgccgcctagctgatccacgtcaatcggatgtaaccagtctgtgaccggcctgttgccggtcacatccgattgaacgggtggccgtgcccccacgtcacctctgtaacaggcggagtggaagtaggtatgacccgtcctatcatggtgtcattcggggttccctccatgagagaaggaacaccacaagtcttcactcatttatgagggaatgacagggctgtcccctgtgtcaggcgaggggtggcgctgggtcccactcaaggacaggctgctgcttagcttccgagcgaaggcacggatcgtggcccggtcaaggtaaggtgggtccccctcccagggaaggataggtagaggcggtgcatgtggtatccccttgaactataaaaggagggccttgcccaccgagca

SEQ ID NO: 50913 - DNA, 749 bp, Oryza sativa
  unsure (1)..(749): unsure at all n locations
ttcctgcagcccatctgaaaattttatttttgataggcatatttcaatccaacaacctatatcttaatgactttctcggatttaatgcatgactctctattctttcacacatgattggctacatgggcattgagaaatgtaaatattaatgaatcgcttgtttacgatgaataactaatacatgtttaaatggatgataagtagaattacttatccttggtctgtgtgccaagatgaaatatgactatcaaaagtagatggagggagtatgtaactattgtatgaatgagctattagattgactatagatgaattggagctagtagttggctatactattaaacttgctctaaatggacattgatgcatgcatccatgcacacatgtatttataacccacatgcaatattttgatttgctattggctagaaaatagtggggatggtgcatgcattgagtttgttgctatagtaaatatagtatgagagagagttattagcttttcttggtcttggtgtacctatgaaatatatagattaatttggaatggagggagtattttgttaaattgatattcccaaaaaatattatgtagtacacgctaaaattcggctttgttaaattgattgtagtatcgtaaagggcatttctcaccccaaaaactaaacattgagccaatgaggtgaggggctcccccacttatatattangtcatttgcccttccacaaccaatgtangactattcaac

SEQ ID NO: 50914 - DNA, 1196 bp, Oryza sativa
tccatcattagcaaatgtttactgtaacgctacattgtcaaatcatgaagcaattaggcttaaaagattcgtctcgcaaattagtcgcaatctgtgcaattagttttttaagtctttatttaatatttatacatgtgttcaaacgttcgatgtgacaggtgtacaatttttatgtgggtcctaaacagggcctaggttcctgctccggcccttcgtttcgtagaatggagtaaaggtattttgttttttttccttaagtggcaacattttaacgtactcccttcccttggtcccgttccaagtaccgtcccattttaagtgtagtcatacgttttttttccaatatttgatcatccatcttatttaaaaaatttatgataaatttttaaaaattaagtcacgcataaagaactattcatattttatataataataataatgatgataataataataataataataataataataataataataataataataataataataataataataataataataataataataaaaaataagacggacggtgacactgaaacccacaactggacttattatgagacaaagggagtagaacaaatatattataaaaatatactattcaataatggagtttcattttttagagcgatagtggagttaatgaattgattttgtgttttaaagttgttattttttataaacttaatcaaacataaaatagtttgacttataacaaaactaaatcattctagtacgttctaagatgcacgaagtattagaaacttatgaattatatttctttagtttttgcacatattctttaaattttcaacgtaggtaggaaggcagaagtgggtcatttggtccaattttatttttaactgtagtgaaaggatatgtaatgagctctaaaactatggcattgtaataaatacatgaattataatgtcatatgcctaatcctaaaaatttataatagcatggatccattaatccaaaataattctagcagtggcaaaactaccttggaacgtgaattgaggtattacctgtgcaacttgaaacaggcttgcttagaaaaaaaaaaaactcaaaggatcaaaagagagtttcgcgcttgagaaaatttgaggctgtaccacgagaacaagtcctcctcgcagaataaatcaaattataaacgtgggctgcaggaa

SEQ ID NO: 50915 - DNA, 951 bp, Oryza sativa
cttcactgtaccgatcgtgtacgtaccgccaacgatcacatccgtattaccttatttgtttgaagattgtagaaaaatgttgaagttatggttggaggtttatcgctcattgctaacgtcactctagcaacctcttggcaaatcaaggtaaaggctgacctgtagtgtagaaggtcaatattacatggaaatatgacaaagtgtgcattcgtgagtgcatgtatatagagaaaaggaacctaaaagtgataaatatcacgctggttttttagacagtgattgtagatatgatcgtttgtttttcacatgttatataactatttgtttgcgtgcttggtaattcgtctagattaaatagattgagggtgtcaaatgtctgaaattatagttaggagggtaaatcatatttttcacaatagtcgtgtggtaaattagacttaacctaattcaagaaactaagaacaaaaatgaatggtgtaatcccataatcgatcttattggttaggatcgtcaaccaaattaatctaaaaatttgtgtcgtacttatgaatcgtgtgttgttccataagtctggaaccatttaatccataatcatggacaaggtttcctatgatgatgcatgccaagcatttaacaaatgagggtacaacaggtggtgcaaggatacaacagttcaaccatagtcataaactcgatatttgtcacttcctaattccttttcttcacatgcatgcacccatgaatgcatggttttatcgcatttccatgtgatttttatctttacgatatagtccagcctcaaacttttgatttgcttaataggtggctagcattacaagttagcaatgttagtattaagcttccaaaaggcactccaacattttttttgtttgtgttctaaaaagccccacgtatgcaatcgttagtgttagtggtacatgatgggaggaa

SEQ ID NO: 50916 - DNA, 516 bp, Oryza sativa
ttcctgcagccctggaggattctccctaatacgaaactgacagctactgaaaagaatgcaatgcgtgagactaaacttaaccgcctagatctgtattcgccgacaacttgtgaccaccttctgcagcctgcaggcctatctgctatcactggaagacattgtttcttagatattctacttgttgcccgttcccaccattctagcaacaaatcacaagagaagtgaccaagggcctcagctgtaggtgccaaaaggataactgaccataactgtccacagtggccattgcatttcatatttagcttatcaaaaattacattgttacaaacttaaaaattatcaaatatgagataactcacctcttaaggctgcaactttaggaatggaatttgataactcctgaattgcagatagtcgtttgcgtctgtcatcctccactggtttgattagagagaggatgtttttaacacactgctccaccacatcataatttatatgttcagccatactgaaatc

SEQ ID NO: 50917 - DNA, 565 bp, Oryza sativa
ttcctgcagccctcaaactcgctgagtagataattcttttgttggccttgaaaaatgacactgccgttgttttgtattattatgagccgttttgatttttttctaattatttttaaaaataaattaaataagtttactaaaaagtatagccaacatttttaacttaaaactagtatattattaaaatactagaaaaaatatccgtgcgtttcaacgggaagaaaacacgagaaaattaataaaaagtcgaaaaagattagcattatgtaattaattaaaatacatatttcaccatcctccatgattaatcacattatttgaattttttcagaatttccagagctccattaataattttaaaaatacgaacatcatttcagcatttatttaaatgaaaacctaaaggaaaaggttcgaattacctcctgaactatcgcggtcgaccgaattacccctttaaacccgaaaacccagacatgttcaccctcaactttcaataccggacaaattaccccctcgacccaattcagagcggttttgtcctacgtggcgtacgcgtagcaat

SEQ ID NO: 50918 - DNA, 734 bp, Oryza sativa
tatgtaaaacttcaaatagcataaaaaaaattagacattttgagcaaatgtttgggggtaagatatctctgtaggaagtcaaaattcccaaaatttactcataggaactacacatattgtttcgacataatattttctcataaattaagaagtgtacgttcacaagtaattttagtttagaatttatgcgctgtaaaggtaatcagaagaaaattataaccagcattcaaaacacattaaataagttcaattcttatttagatatagtaaaagaatattttaaaacaaagtcacacacacatggacattcataataaaattttacgtacattaaataaggtgcacgcgcatgtgcgcgggctaccttcctagttatatatatactaaaagtccattaaactttctacaaacgctcctaagcctccacgtgacatcctataaacactcctaagtcgccatgtggcactgtaatttatagaaatttataaaaattctctagccattgatcttcattaaattaggtggacccaatatttaccaccattaaatttattaaaaaagattgcctaacccccaaaccgggtccaccttgagcctgtacgtattaccatatgtataggtatgttttttttaagatagtacttatgtacgtacttccaccccttcttccctcaatttcttcatatttttgcacacatttattcttctattatcatactttttagaaaaaaaaa

SEQ ID NO: 50919 - DNA, 2256 bp, Oryza sativa
cccccgtttattaacaaatggattgggtagacatgaggctaccctaaatacatggttttcttgagcctaatttgattgcatagtttgagagacaatccatcagtgaacatttcatttagagtatgtgcaaggctcgacatagcctagtgtgaatattattggatggctaaatataattgtctaataattattttgataaatgcgatgtatcatgaatagacggttgtctacaatatgtaggaagggggccaagggaatggtgaaggtgtaggggatttgcttttttctatataagtagatcaaatggtggaaaataatgtaccggttcaaatgataagggattgcaagatgtttttctattttttttatttttttatgattttctctaatttattagaatgccacgtgatggcttatgagtgtttgtatggataacgcgtggccgctttatattaaaaagaagccatcatttaaaatcgattacatgttatataaaatatagtttaaagcacttacatgcatgaatgattattagctttatttcgattatttgaacatattaattcaaaaaataaaatctcgaactaagcggattgttttctctaagtaaaggcaccatatttttctatagaatagcataaactctgaggtagttctttttttccttataaattgtatatctaatttagcaatgtatgtttgcaaaaacaatgtatgatgatgcaacctgtcccgtgtttgttgaactatttcgtattttttgtggcatttctgatgacatgtatgtaaaagggcattagtgtttgtccctccagatatatttttatgtagtggcttcagcagttcagttattcatattttcttatgtacggaatatataatttagttatgcatgtttgtaaaacaatttatgatggtgcaatgtatgttgttaaattatttcatcgttgttattgtcattttttaatgattagttttacattcaagattattttataaaaaatgaatatatatatattattttatcttgaattgttttagataataaaaatcgattaaacatgatgtaaagtgcgcttaaatcacctcgtgtcatgttttcaatgttaaaaaaaattcaaagaaaacaagaaacatactccctctgtccaaaaaaatccaacttctggagtttgaattttgtcccacaaaaaccaacttctaccatgctatctatcctcggcacataaaacgagaagttttctcccttaaataccctttatctacccatcaacattactatgggctttttataggacaaagggtgtaccattctccacttaaataatgaacccgttattttaaacattagatctattccagaaaatcataaactgctgcatgacatgtcttatattaaaataaaatctgagaaatctgaggaaaaaacaaatcattggttttcactttgatcgttcgaaatttttttttaaaaaaaaaacaaactccccaccacccacccctcccgttgtatacacacacaaccttgtccaccctccaccccctaccatttttatgctatttatgtctctttggtccctccctccttatttttagctagcaaactaaaagaaacaatcaataaatgtgtgtaattttaagctacatgtatgatttctaatctaactattgctttatttgtaattaaaccaataatataacatccatataatctaagatcccataagaaataataaaagctatgaagttatagttgtttgaaatttgttataaacattatctccactattataaaaattaaagatatttccgctcaaaattttgatgtcaccttatttcggtatgatgtaggtttcatccgtcctctccgagatttaaataaaaggtcccacgcaatccatcgtcccctttttgctgcagatgaaattttcttcccaagtattagtcagaccaagacaagtgaacccgaatcgaactcccacatgacgtctcatttgatccgctctgcaaccgaaaacaaaagccggaagaggagagcagccgctggacctagaccacacatcgacaattccctcctcgtcgccttcctgcttgctgcctcatccccaattgatctttcttccaaaaacaccaaaaacagaatcctccatgtacgggaacacatgatgctacctcattcctatccattatcaaatcagattgatcagtcccatgccagacatcattctggttctacatagggaagggctgcaggaa

SEQ ID NO: 50920 - DNA, 1143 bp, Oryza sativa
aaggagacaacatccttgcctccgtatccttttatcctcgcctcacccacgctcacctcctcgtttcacgccctcacggttgcccccacgattctcgcgcccacggttgtctcttcgtttcccgcgtcaactcatcacgtcgcccattgaatccacgccctgcatttagtgcgcctatcagcggcacactcggagtagggcgcacaacggtcacggacacaacctgagtgaaccgtcaccactaccgccgcatgagtagcgggcaagagaatcgaggcgtggcctgaccgaccccccgattttcacgccttaaacatccccatcatcagcgtggtcagtggcggcaaactgctgccgtggttaatatgccaacctggccactcggcgacatttccttagattccctgtcgggcccacaaccccagcttgggaagtcgtgaggcaccacatcagaccgacctcaggaggtcagtgtccaatatggtgccaggggctactgtcggagatgggcctgggggtatgcgaagtgggggaaagttacctttccatccagccgcgtggctctacagcctagccctactcccgcgcctcgcgagtcacaaaagcggccggggggcctcggggtgccatgtcgtgcccctcgggctctcccgctgccttgtcccgaggccctcgcccagctaccatgtggcggggggagcgagcaggaagggggccgaggctgaacagccatcaatgcgcagcgcctcaactgtccctcaccgcatttaatgcggtaagggcagatgtgcggtgccgcctagctgacccacgtcaatcggatgtaaccagtctgtgaccggcctgttgccggtcacatccgattgaacgggcggccgtgcccccacgtcgcttctgtaacaggcggagtggaagtaggtatgacccgtcccatcagggcataattcggggttccctccatgagagaaggaccaccacaagtcttcacccatttataagggaatgacagggctgtcccccgtgtcaggcggggggtggcgctgggtcccacttaggacgggctgctgcttaacttctgagcgaaggcacggatcatggcccggtcaaggtaaggtgggtccccctcccagggaaggataggta

SEQ ID NO: 50921 - DNA, 885 bp, Oryza sativa
ttactaatggtatcaatatcatatccaaaatacaatatgctcggtaatttatacgaaagtacatgtagtttagtggtttgtagtgatctaatcgaatagcacctcaaggtcatatgttgaaatcttcatgagagcgaatttcacattgagttgtttgaggggctaagttcccaatttaaatgacaccacacaccgccgtgacgtgtggtgtccctcatcgagcgcctcggtcgtcgtgcgcattggacggaggcggctcttgcggctgccatggaggcgggtcaccggcgcctgcccctatagcgtgaaactgcccatgtcgccgagctcaaggagaggatattccacaagtacctcgtgccagcggagaagacgaccaactcaaggaaacagatggccgcttgagaactgatcttcgtgtgcttattaaatctttgtaaagcatttgtgaaatactgcccctgtttttgtattgtatgaattttggacgtaatattttactattcatcttattttatttttttaaaaaaattttcattaaaggcatttacgcatgacttatatgatttcactaaaatatgttgaataagtggaatgaaaaaacattatatattagagtaaattttagagaacctcattatggtcaaaattgtaaaaaaaaatacagatattatgacgcgtggcacataactattgatattgatattttggtgtatatatatatatatatatatatatatatatatatatatatatatgtttcgtaaaatcacacctttattaaaatctttattaattatagcatatttgaaacaatttttcaaagtacagaagagataaactatcaccattagttaagaacttaataattaaaatttttatata

SEQ ID NO: 50922 - DNA, 515 bp, Oryza sativa
cctttgtttttcttgcggattaatcaaacggtctttcttatatttttcctatattttacatttgtattcatgtcagaatcctatattttttctattcctccgttttctaagataaagtaaatacaaccttcgaaagagaataacttgtatccttaaatctagacatgaggtatgctcagattcataattgaaagtttaatttattttacggaaggaacatagtaggcttcttattcaaaatcttgtggagatttaaccatctgctttttttttgtctcatactaagggcatgtttgggggagctttagattctgagaagcagctgtttggtagccagcttctaaaaatctggaaaagctctgaaacccagcttatccagcttctggcttcttagttcatttttcagaatctgtaactatagattctcagaagctgtggactatttagggcagcttctagcagaagccaaaagctgcagctgggagaagctcccccaaacaggacctaagatgtgg

SEQ ID NO: 50923 - DNA, 805 bp, Oryza sativa
gaggccaacacaagacctcgccgagacgccggatacggagggaaaaggaagaagacaccggatcaggaggaagaggaaggagtgagaagggaagaatgcaacctcgccgccacccttctcttctccaccatcaccgagctggcgagatggttgtcgtggtgctgccgagcttgccgtccttggaggtgccgtcgccggccatcccgccggtggccgactcctccgcctccccctccctcccatagttggcaagaaaagagaagaaagaataggctaatttgtgggccccatatcttttttttaactagtatgccacgtcaacgaaaccagataactatggccgtgtttagttcacccccaactaccacaaactttcaactttccatcacatcacatcacatccaaaactttcctatacacaaacttccaactttttttctgaacttccaacttttttcaggaacttaacacagcctatactattataggacctaaattgcacggtttgtatagtttaggagtgatgatttctggtgttgggagacaagggatgtcaaataaactcgacgtaaagttgagggatgattagtagacttaatccgccaaccaaaggcaatcttaattacaaaccagtcgatttagcccattgccatccagcccattagcaggcccggcaccatcatggtctccaattaacgtcagacactgctcctccttgtaataacaaccacacaccacaatttttcaggcaatttttggccaagcttttggttcataatactactactactactgggctgcagga

SEQ ID NO: 50924 - DNA, 682 bp, Oryza sativa
acatgcacccacactaatgcacactttatcgtatttccatgtactatggtacactacaggtcagcctctaccttgatttgccgagaggtttgctagagtgacttttagcgatgagcggtaaagccccaagcccccaatcagcacttcaaacatttcttagaatcgtagggaaaaaaaagggcaattgcgcacgtgtttgttggctgtacatgatagttagagcgggcgggtcactggctctcgggttgcacagggtcgtaacaaattaggcttggctaggctcggacgctcggttagagaaacgagttaaagcgtgagctcgtcttggcttgttttctggcttgagctggcttgtgagcctacctgttgaagcatctcttcatgtataatttgtaatcattaagaaagcaagaacaaattattgacatgtaaaattaaaacaagttcatatattcaattcttcaaaatccagatgataaattacaatttgatatattaataactccactaaaaagtaaaataatccatataagtacatgacgacataggctcataagccaactcgtgctcacgagccaaataagcggctctagagccatcaacgagctgaaaacggaagcttgggcttgactctttggcatagagccgagccgagccatgctcgagctggacccaaacaaac

SEQ ID NO: 50925 - DNA, 615 bp, Oryza sativa
ttcactcattgtcacctatgggcatcgatgaatcgcagcagctcctcctctgaccaacacctcttctccctgccagcgtcgctgtccctcagccggcgcccctctcctccttcctgactagcacgcctcctttcctagccgatgcccctcccgcttccgtgggcttgccggatttagaccaagcagagttcggaggagacggctcggtccagcaagctcggcaatgacaccagcaacaagctccccctaccaggtcaacggcagcaacaagcccaacggggagcagctcatcagctggtttcaagccaatgtcgttccctccccctcctcctgtccttcgcttgtcgcaacctttgctggcggcagttgctagtggggcgaagcggtggtggaagaagggtgacaaagatctaggcgcggggcttggagcagcggtggtggcgcagttcttggcaaagggccacgagctccaccgacggtggccgacgactcctcgagctcccctatcccactccactggccgttctacccctcctcttttaaagctaagggggggtagattgacctccacaattctggatgatgagggaccatgtcgttattggattgtggggc

SEQ ID NO: 50926 - DNA, 544 bp, Oryza sativa
ttttttatacttgtggttgctctaagctggtggcaatggagcgcatgccagagccagtgagccgaggcggcggtcatggagttcggtggccacaggcaaagcacctccggcatgttagagaaaggtaggagtcaaggatatttttgtttttatgacattttttatatggatttaattgagagtagcaatttaacaaaaccaaaatacaggatagtatcattctagcaaacctgtgctttggagatgggacaagagccgtgtcgggaggtgggacccacccacacgtgacaggccacggctgctccagtaccggttctttccttgtagctttacctttccaatgcttcgtcgtgttgtctggccggccaccggcggtccgtccggtggtttctctttgcatgcgccgaccgcggggtggtcatctgtctgttggctacaacataatgcagtcagtgtactcctaagcggtatcaaacgattgggggggtttagatctactccctccgtcccaaaaattaataatctagaaagagatatgatccct

SEQ ID NO: 50927 - DNA, 2889 bp, Oryza sativa
caaccctcacccttccatgctactcaccctcacccttccatgctactccaacggaatatcattaggacactactcacgtggatgcttcttcaactagcgctatttatatttgtactttaaccatttatatttctcttcaaaattttacaaaatattgaaatacatgtcatattattaaagcgtattacatactaaatattaacacaagtagtaggctttcattcatcataattaatctaataattctagattgttagttatccaagtgcagatcagcgatgataaatagtacatccatcttaaaatatattccctccgtcacattttaagtgtagtcatgagtttccatatccaaccttaatcattcgtcttatttgaaaaaaaaaataaaaacataaatcactcataaagttttatcatctaaaaagaaaaaaatactaatcataaaaaaatgacggacgatcaaaatcagacacggaaactgatgaatgtatttaaaatgggacgaagagagtaacaaacttttaaccgctaagacaatgactaaacttgatgactatttttgactgccaatgatatcatgtggtcatcaagaaaactacaaattattgtggtgaggacatatcaatctactccctccgtcccaaaaaaagacaaaccctggtttccgtgcgcaatgtttgaccgttcgtcttatttgaaaaaattatgaaaaaaattaaaaagacaagtcacgcacaaagtattaatcatgttttatcatctaacaacaataaaaatacgaattataaaaaaatttcatataaaacggacagtcaaagttggacacgcaaacccagggtttgccttttttttgggacggagggagtagacgtgtctactatccaaatccatagtatcgtgtcttctatttggtactatctccgtcccaaaataagtacagccataagttttcgcgtccaactttcatcgttcgtcttatttgaaattttttatgagtagtatttttattgttatgagatgataaaagatgaatagtactttactcgtgacatattttttttagtttttttaaaaaaatttaaataagacgaacgattaaagttagatacggaaactcatagctgcacttattttgggacagagggagagtaataggttaattcgacatcattgctactaaggataatggcctcggttaataaacaccacatgctcatcttattgtttgtttcgtttcacctctagtacgttcgaccgctgtcgccgccactgaatgcatcccggccgcttgctaagcggctagcgcccacaccgccgcaatataaacccgtcctcatcacacacacacacacacacagagtgtctctctctccctctctctccccccgatccatcgttgctgcattagaaaatgcattcagcacgaggtctactgcgagagatggacaattcggtgtcggaccggagcttcctcatcgacagcgacgaggaggacgacgccgccgccgccgtcgaggatgggaagcgtcgcggccacggcggcgatgagtcggacgacgggtcggactcgtcgtcttcgtgcggtaccccgcgggtcgccgccgccggcggtggcggtggcggccgcggcagccagcccagctcctatacgcagcagtggcctcagagctacaggttcgccgacgcaagttcatttcttctttatatttttttcttttctttcgcagtgccacgcgtcaataaaagtccaaacttttctgtttacagtcgaataatttcagtcttttccattcttttctggagagttcagtttgccatcccgtactaattaatcaccactagtcttactttttttaactgtgaattttgcaatgcaacacttttttcaaaaaaaaaaagaaagtatggcagtttttctgttgtttctcaacaactcatttggtacgtttcttggataatgaacatctggtaggtagaaaagcaaaatacaaatttagattctaacttctttttactagcacacaaaggcctgtttggctaatgggttggggaaacaaagagtttcttctaatcctagccatccattatccctccctcgttttatcatagccctttatccatttccctattccaatcccactattcttatcccattatccaaacacactaaaagagtctctgcaagaacagtttgaaactaagaacaatgatttatacatttttatttggcatagacataccacatgacatattcttcgaaaattttagttgattatatttcagatgccttctgatcctgataggcctatgatggccagaatattcaggatatgcagtagccatttgggatggcatcggggtgtgaggacacgtgttggtgaacctataggtggattgcagaagccattgacatgtgggcccacgatagtgacgtgtcacggctagtactggaattggtgctacgtgtcactgttcctgtggtccctggtgctgacttggcagcttcagttggtccccatctgttcttccaaaataattttgtctgagagaaggagagagaatcagtggggcgttgtgcaatctgaatattcagaatttcagatcaatattatcggcgcctttgccaattttttatctgttctgaatatatagtattttacattttggaaagaaattaagaaaacgaaacacggcgactgaaatttccgaaaattttcagaaatatcaaaatggaattttcagtgaaattagtttttgctgtgtatgcgcaaatttcgttgcagtgaaacaaaatcaaaaaatttagaccagagtaaattcctaccaagaattaaacagaagtagatccgaaattccaaaccgaaattccaaactctggttccgttt

SEQ ID NO: 50928 - DNA, 639 bp, Oryza sativa
ggattaaagcgtgtatgcaatcctattcgtttatttttcctattcctatgcgttgaaattcctccaaaatgaataggccctttggggttttctgtgttacttccttgtctatttcttttttttcatgattatgagaggacaattaaactccctacttcattcttagaaaatcaaactttaaaattctactccctccgtcccataatataataagttttagagtttgatacggttattaataaagtaggtagaagtgaatggtggagggttgtgattggatgagtagtggaggtatatagaaaaagtgaatggtggagggttgtgattggttgggaagataatgtggtgaagaagttattatattttgggataaattctgaggctaaaagttgttatattttgggacggagttatgtgtgttttctctattcctgtaattttatataaaaatttcctccaagggagactcttcattctaaccttactacgggtgaacagaaatacttcattattagagtatcaacattaaacgtgtacagaacaccgtttgccagcttgcctatgtttcatgcgtacaattttatgtttctttttttttaaaaaaaaacatagactagatcatgtcatactcaattaacc

SEQ ID NO: 50929 - DNA, 787 bp, Oryza sativa
ttttaatataatttattattagttttaaaaaattcacatttgttgactcaaagtacatatacctctactttatatttttttctcaattttgcactgcacaattttagtgcagtgcacatcttaagtttttgtgcagtgcaaaattcttttggcaaagtttcgtttggcatgtgtaccagcagccttgggagagtcaggttctcaggttgcagagaatggaagtaaagcatagtgttagttatctgtggaaaataccctggcttcttctggacagttgtttaagaacttgattacatctgttagtgaacttggcttacgtccggttggatgtagaggtcggatttatccccttttgttaaaaaaaaaatatgtcggtgaacttacgatcagacgcacattcctgaggtccattggaatcctgatctcaaattacatggtggactcgccacctggcacagtgtaacatgtgcctggaagggttccaaaatgccgaagataactactatctccatctcataatataagggattttggaggaatatgacacatcataatagtacgaatctagacttgtcacattcctttaatatcccttatattatgggacagagtgagtatttggttattgtggttattggccttgttgagtcgtatccacatttattttttttgaaagtaaagagagatttcattaatgagaaaacagagggttacattcctggttcaagagatcaagaatttctgcaggggaacacaatctccagaccgtattagttcctgatcccat

SEQ ID NO: 50930 - DNA, 642 bp, Oryza sativa
atcatgtccaccatatatcacacacactttgcacgatcttgatcttgagtatgtttagttatctgctttagtctgggtttttgatttagtaataaatatgaatgcaagtaagccatgttttatctctaccaaactccacatatcaaaccttagaataggaataaaaagggcaaaaaatggtgaggaatttatattgatatacttagagagattgagtgaatcatttgaggaacttagctttgttttgcaaaatcatctgaaaactttcagaataaaagttgaataaagatttggtgattggtgctctaattgttgttctgcctttcaaccgcccaaggaaaggagaagcagtgtcagagctaggaaagcattgcatcaatgcaaaataaaataaatcaggaaatgtaaatcaggaaatgcaaccacccgaacatttgtagctagatcaatatggacttaattttgcaactgagctggtagactataaatcaaattttgtagaaaaaaaaggtgacatgtacaagccaaaagcattgttttgttcaatgaattttgttgcaacatcacctcagtttcccatggattaatattcttcagctcagtcactgtttttttttgtaccactcgagccggacactatga

SEQ ID NO: 50931 - DNA, 1154 bp, Oryza sativa
aaaaatcatcatgcaatatcccatcccacacaggttaagaatttagagtctagccaagtgtaatacatgtcccggtgctcagtaaccgcgagcacgactattcgaatagatttggtttactcacactgcagtggatgtacactttacccgcactccgcgactgcccaacacataagcctcgtctcaacacatgagacgcgtcacggcaaagcttttcgataaccttgcattggcagtacccgctccatgaactcaaatcctcatgcactctaggcgtccatgtttctagcagtgagaggagttctggcgctcccgggaaagagaagtctcacacacatattaaattatggttcaagttaagttctctctctcacacactcatggcagtcctaccaatggcgacaccaatgtagggcacgcctctcggccctacctcaacggctgccccaccgtagcgcacctgtctcactcaggggtgaaccatctatgcagggatactgcctccgctcggctatctaatccgctaggtctatacccattcgagaagtacggttgtacgggggttgtttcatgcttaacttcatggctcggtctttaattgaccggggacggtactagccttttccagataccacccaaatcctccgtccgtcctagtcaaaaatagttgtttaattttatttccctttgataaatcatgtcatcattatcatggcaatgtggcgctcctgtctccacatgtcgcatctcaattaccttcccaaaggtaattgcccaggcatatagcatttgctaaatatgagcatgcatgaatctagagtagcatttctaagcaattgtcatggttgactagggactcatacataatcatgcgtacaaagatttaaggataaacaataatcaaggcatggcataatcacaagtgagatgttcatcattgcatgcaattttatttgtaaacaaaatagtttcgcaattgggatcaacatgtttaaagaatagtgatgacttgccttgctcgtagttctgtgggtcttgatcctcgctcggatccgcaactccctctggctctaaaattacgtgcgaagaaacgatttgaattcggttagatttcaaataaagatccaagtaaatccacgaagatatcgagagcg

SEQ ID NO: 50932 - DNA, 697 bp, Oryza sativa
ataaagtaaatggccggtcctgcacattactgtagagatgcatctaactgaatggccaacttacttatatctccaaagaagtggtctcgttattttgtgaatattaatttagtacatttttctgttcctttccttttctttctttcgtttttcttttttgtaacggacatgttattttgaagatgtaaaatactatatatgctgataagaacatatatacaacatttcaagaaaccatatagcttttttttattccaattgcagaaaccatatagttgtagaagagatgaaataagttcatggtcaagaatatctaatatcatctctttctatataagaaaatgttttaatccgacaggttcatagtcagtgatacacatagtgacatgcatctatctgcatctttcatagatatgtaagctacttattgtaggtaagcatcagtgcccgaacacaatgccttattgaggaatcagtctaaagcatgctcttgcttcaaactacaatctatttattaacaggaagactgttttcatgcaagtgaactgatataggaggaaggatcaggaggcgttggtatttgtactgctccatcaagcatttgtgtcaccttaagcatggttggccgcatcgatggctcctcctggaggcaccacagtgccacagcaacgaagcgctccaccttttttatgttgaa

SEQ ID NO: 50933 - DNA, 801 bp, Oryza sativa
acatatatttaactttacataagtatgttatatgtatacataaatttaagcttatacaatataaattataaattaactccattttagccatgcacaaaagttagatatttgattgaagagtcaatcaatctgtaagtagagacatgccctataaatatcgacatatttagaatacggtaattatcatattataagaaacggtaatttccacaagaatacggtaaatacggaaacgattggtataatagcaaaaccatttccgttttcatttccatattttttaccatttccatttttattttggtcgattaccatttccatatggctcaactggtagaaagtcgaaacgaacatcggtcggcggggaattactgttaccgttttcacccctacttacaagtttgcacaacttcaatccccgttaaatggctaaaaaatgggttaatttgatctgtgccattgcaaatatgtctgttcagataaataccattataattcatttatgcgtagccgtgccactcaaattttacgaaattagaaccatgctatcactgtcaggttttccatcttccgaatcggcacatgggactcacccatcagattcttcttcttccttacaccctccattatcttcttccttccccatctcttcgtcgtggcaaggagcgcgggcaggatgggagggggtcggcgacgtgtatggtgtggccctataggagagcaccgactaaggcgacgaggccgtgagcccctacgcttccatgacctagaatgatgggacacgcagcacggtcttcgcct

SEQ ID NO: 50934 - DNA, 1401 bp, Oryza sativa
tgctattgatttcccaaagctgaagcacgtccacctgcatgagcttcccagcttgaaagggatatgtgaggcaaaaataatgtcagctcccatgctggaggccatcatgatcaggggctgctgtagtcttagacacctgcctgacgtccaaggattgcatgaaccaagacccatagtatactgtgagaaggattggtgggataacctagtgtggcctcagaaagaaggtggctatgatcagtcattgctctacaagcggcagtcagcgcaatactataagaaggccttgcccaaaggctctattctcaggtcaaatctatccacatacctctataagccaataagcaaaaaatattctatagatttgcatggctagtataacagaattccatttcaagtttgtttccgttactgcaacactgctttattatattttcctctttattttgttgatcatgctgattccatcattggttgatttttccaaatgaagtttttttttttttgagaaaccccaaatgaagttatggaggacagtggtgtatagtgggaaataaagtaaaggtcctatttgaaatttagggatttattggaaatgaattgcatggctagcaataccactaggcatgcgattcttggttgtaacaggttggtaagagaagaatacaagtgcaatttgtaaaatgtttagtgttaattttccttgcgtggttttctccggaccttgggaactagaaatgtttttagtgttaattgagaggtaacatagtgaggtatatatatgtgtgtgcgtgtatgtgtatgtatgtatgtacatgatgggagatcatagatttggatgaacaattttgagaaagggggagagactaggttaattcatcttcattgcttgcttactagtaatagttatacatgctagcactctacctttttgtacagattacttggcttggccccacaagataaaactctatctacaatgtaatttttatctttaatacatgtgaatatatctgagggaaaccaaattagcaaggaaacaaactattcttatctgtattttccaactaataggaaaccagcaggcccacagtacccaggccctacattttaattggcactgttcaggattcaggaatagttatttaacctctcaatacttcccctagaaaaactatttttgcactcttttgaagttccagcactgtaaaatatctgatgaaaagtcgcaccaaaatattagttcggcaaaaaaaaaaatgataagactgtttgaagctaagtggctaacttttgagtgctggctataatggcggcctgctgtcatttggtactccttgtttatctgcatagtaattcagcaacaattatgtgcgcacacccagatggaggtgtagaaaa

SEQ ID NO: 50935 - DNA, 694 bp, Oryza sativa
gtattgcttgggtaactttttctaagctattcgttggctttacactacatactatacaatattcattcggtaagaaattaactatgatctgacttatcattcaaaagaaaagtatactttgttttggaaacaggtaagtgtaaattaaaagtaagtagtttttattcaaatggaatgtttacgggctctcttttttaacaaaatttttaaaactattattgcaaataattatgtttcagttgttccatgaagttaacaatccctcttactgattcatattgacataattcgaatacttatctagcccctgcttccctacgatgtgttagacccatagtatttttttaagaaaaaaacaaagtgaatatcaagtttaatataacttttaaaccaattatatatttctaccttagtgggttatgtcttttgtgtgcatgatgtagtgaaactaataatgccacctgaagggtattagcatctaaacactaaaaaatgacgcaatggatatggtaacgggtgttccaattttggtgaaaaggaagaaccaattttttctaagaccttataagattttccctaattggtccgctttactcttattggcatttcctattttttgttttattttatgcaagcattttttttaagttcaaatgacgtgagatgataaataaagatgttacacctaaggtgc

SEQ ID NO: 50936 - DNA, 1206 bp, Oryza sativa
ttttatttaagcaaatgtgaagcttgttatgtccttaatgagttagcgtaatgcatatcccgccaaatacgttgaagtgatgtgttgcggcaaatgagcaaatggtattttgtacccttttctttttgcttgagtcaataggaaagccgcactattaagagggatgatgcattgacaaatgagcagtgatcaaagtgctcaaaatcaatttttaaaagtgtttctcctcagttatagagttctggagtttttcggagttttccgaaagtcattttcggactttccgaaaatgactatgaaggcaaaaatgtttctgtgtattttcggacttgtccgaaagtgattttcggacttttccgaaaacatccagaatgatgttttggctatgagtattttcggatttgtccgaaagtgattttcggacttttctgaaaacatccagaacgatgtttttggctctgagtattttcggacttgttcgaaagtgattttcggacttttccgaaagtgattctagaacgatgtttttggttctggatatttttggacttatccgaaaaattttcggaatgtccgaaaattctctcgttgactttgctgttggtgctgaactggaatttttggacatgtccgaaaatctttcagaatatccgaaaatcacaattattgtgtataacaggcagaatttgggctttggctataaatagccccctcccctcacttgtgagggctgctggtcacattggatatttttgtgcccttggcttgctcttgttgagattcacttttgagccttaccttcttgtttcccctctcacccatgttcgattcggatttggtgtgtgtgtgagagttgtggattcgagtttgtgtgagtgcttgttgctgacttcgtgaagatttgtgagcacttgcatcatctccgggagttcaatgcttcatttgttactcttggaggttgaggactcctaggcggctaggtgtcgctcccgacccaccgatctacatgtggttggccgggagaagtttgtgaaggtcggatctcacctccgaaagggaagagatacccttagtggaaggaggagtgcttagtgcaacctcttgaggaaagggttagctaagacccggctcttagtgagctcctcaacggagagtagaatccctcaaggattcgaactttgggaacaaattcgtgagcttcatctt

SEQ ID NO: 50937 - DNA, 1825 bp, Oryza sativa
gtaattacctgcagtggttaacagtaattaactgaggttagctcagctcagctgggttgcgtacaaagtaacacgactgtctagaagaagaaaaatcaaatgaacactatattcagagaaaaaaaaatgaaactatatatttagagggggggaaatccttatttgctactccactttgagctgtcaccaaactaggtatgccgatgtaggcgaggctggtgatgtggagacttgttgccgcagccaccgtcccccacctcgtccatggctggcgccgcctccccatcctaagcatcatcgcccagatctagtttggtgtcaagcgcatgcgaatggctgctacttggggccatcagcaactggatggcaactgtggcgggctggcggcaaggtcaggaagccgatggaggcgggagaggaagagttgatcagcaaatgggagacgaggatgggcggccaacggccatactgcccatcagccatggggatgggagaaatagcaagaaagaaaatgaagagggaggaaggcgatggttcatggaaatttaagtatttgctactattctatttatcaattatccaaatgccaattttaattttgtgctggtaaatttaacgccccgcgctttgttacgggatatatattagatagcgtagaaataataaaatgagttggattgaaatatcgtgaaaaagatgatttggcatgtgcatatttattgttgggagtacctatagaacatttgacatttttctaggagaaaaacttaaatgtaattacaatctaactagtgtgtaactagaggtttactctgatctaacaaaaagtatcaaaaagtatcttgagtatcagtacatccaacgatcggaaacgatttggtaccgtgagataccagtacctcgaggtactttttgtttgaatagcgcaaatctcacgtaactaagatgtacttactccgtttcacaatgtaagtcattgtagcattctccacatttatattgatgttaatgaatctagatagatatatatgtctagattcattaacatcaatatgaatgtgggaaatgctagaatgacttacattgtgaaacggatggagtaatttatatgtaagaaagttttgatcgaaggcgggacctcgagcccacgagtcgcccacgcgccagtggctcgggggcaaaccctagccgccgccgccacccaccctcctcccctctctctgcctcgccgccaccggagttcaccgccgaacaaccatgcggggagccaggatggcgagcggggccataccgcggcgacgcgtcgtctctggcaagagggaggcggggcggagcgcggagcgcggtgagccgagcggagcacggtaagccgagcggagggcggcgcgctcgatggcgagggaggccggggatccggcaccgcggtggctagatccggtgctcccgcggccggatctagctgcacggcgcagggcgacggctccatcatgggcacggaaagctacggctgaaggccgccagcggcggcggcagcggcacgagggccgcgtgccggcgaggggaggactgtcgcccgcttggcagcatgctcgtgcctctctccggccggcctggtggtgtgcgcggggaggagctgtggggtggtggactgggctagctggtggctgagaagatgatgtggtggttcagcgacggttgttgtgtgaggtggtggtggcaatggatggaaatcgctggcgaaagccttgcttagcacttggctggcatgacgacggcgatgccctttggcaccgtttcctttcttggaggcgtagttatggcattt

SEQ ID NO: 50938 - DNA, 1717 bp, Oryza sativa
acttgcaaaagaactttttatttgcaaaacttgtaacatgttacatgtcatcaactatcatgaagtaaacctgtttgagtcaaacatcctcctattctggacaatcgaaaagagcaaaatcttttgctaccacctaatatcacccttctacgctctagcagtacatggttgtggcaatgggcgtcacataatcttagtagcattatacatatgttcttaccactattttacatcttcaaagctacactgccttttcgaagaaaagaaaataaactacgctaccaacattaacttgaatagatgcgctctgcacaaaacaaagaaaagcctttttcagcctaaggggcattgttgggctctcttaagaggacactctcaaacaaatccaccaagattcacaacataattcacacctcgattcatcccaagccagccaaaaaaataaataaatccccacaatcccaatagactgaccctctaaatcccctaagtagatgagacgtacgcaccaaattaaccaaatgcaagattctagttgtacaagagtaatttattcggcactaaatcgatacccacatatttcactgcaaattctaccctacctgacgcattcccgcaggcaatcaattttttgagaaaattaaaaacaaatgggtgaaacatcaactgcaacaatcatgctgaacccagaccttgtggaagcgcgtcgggtgccgcgggagaccaccggtccggcggccgcggccggcacccagaacctccccataggctgtagccgctgaaacccagtaccctggacggccactggcgcgccgcggccgtgcgtggtgggtagggtcccagactcccagatggatacgaggaaaagcagaaaatagccaaaccgcaggcgcatgaagaagacaaccgatgtgtggttagtttcttataacctccgtcccatattttgggaaagatggagtactattttttaacctcttcaatttaaaatttaaaataaagtcgtatgtcgttacgttataacggataaaacggaaaagtcccatataagcatggatgagctaggatgatgattgaaaataaaatgttggatctggtggttacgtatattatatgtacggatgcactgcatatggtgggaggaggacatggaagtaaaaccactccgcttttaagatggtatagaaaaataaagctttttttaccgcatcatccgaaatggcatggcatgtaaatgtttgtgaggcacacaaggtagctctctttgcataggaacatcgttttgtttggatgcccctcttctagcattgggttttgattttaaaataacagtttagattatttgttttcaaaattatatcagagaaaagtttagaaaataagaaattacggttgggaatacgttttggcaaaacaaatcacataaaaaattagtaatataaatgaaattgtggttatatagtaattcagtaaatcaagtgtgttgtgttaatttaccaaattattttagaacatttttactactaataagttgcactattaaagaaaatttttactactaaattaccaaattattttagaacatttttactactaataagttgcactattaaagaaaagttttactactaatttaccatattattttagaacatttttactactaatgacctaatatcagaagccatgttaatattgaaagccatattaggtcatg

SEQ ID NO: 50939 - DNA, 780 bp, Oryza sativa
ttctgaaacgcggtaggaaagaccagcaaggatcatgtcaggagaacccagcatggttaatgcattcaaagccgacattttctaaagttctgataatgaaatgtgaactaatctccctctcatgtctatcatattgacagctttgtaattgcttttgacaggttcaaccgttgcctcacaggtctcaagactaacaaatgccgttctccaagggctataagttttgttgtcatcagtacgagcaaaaggttgatcaatagcaatggctcatctcctgttcttgcccatcctgcaactcttgctactatactgcacgaaatctgcccaagctcagctaaacatcagtataggctcctctttgacaccccagggggtaaacaactcatggatctcgccctctgctgattttgcattcggttttctggcggtagatggaaactcctcctcttacctgctcgccgtctggttcaacaagatcgctgacaagaccgtcgtctggtacgcaaggactagctccaatgggaaagatgatacaataccggtacaagtccaatctggctctgtcctcaagctcgctgatggagcactctctcttcgcgatccatctggcaatgaggtatggaatccacaagtcactgatgtgggctatgctagaatgctcgacaccgggaatttcaggcttttaggcaccgatggcgcaacaaagtgggagtcctttggtgacccttctgataccatcctacccacacaagtgctttcactggggacggcactccacag

SEQ ID NO: 50940 - DNA, 1103 bp, Oryza sativa
tcccatggatggacggcaagggtgcggttgtagcccgattggccgccgcaagaggtgccagatgtggtgacgttgtactgtccttagcacggatggacgagctacactcgttgcgccatatcaccatcaccttcgccggagcactcaccggcgacgccgctgtatggtccaccaccggctgaaccgccgcggagcgccgcccttctacatggcagcaggtggctctagcaaacgtgcagcccctccaccggcccctccgttccctggcctctcgaccgcaaccgcggcggcaaacgcgcgccccggcctctaccgcatcatcatgcccaggcatgtccctgccgagttgagcggcggcgacaaggccagctgtcccccgcccttgagtgagggggaggcctgagcatggggagggatgaggtccaggaggtcagggcagaccggcggcggcgtcggtggcaacccaacacggcggcggctgcgggcggtgacaatgaccagacgacagaccgtagtgtgctgccggcgataccatgctacaggctacaggctacggctgctcgctagggttggtctctatctccctctccctctccgagacaccgtgcctgccgccggcgacttgacgagtccgaccactggcgtcagttgcgccgcctgagcgggctgaggcccagctaggtagttaacagcccatccgcccttcgctgctcactaggaccgtgtaattaggctaaggccacatttagcataactttacatatccacgataaatttaaagtttatatggatttaaaattttaaatatttaaagtttatatggatttaaaattctaaatttaactaaaatggaaataaaataatttatattagtattgttaacgtaacagtaggtctatatccataaatttgtgggagctaggaatatccaacttcaaatatttatgtatctagagctttgtcgaagaggatttaaggtgtgtttgaatcactcgtttttgatccatacgttttctaagttagtaaatgtgcaatttttttttgaaaaatatagaaaaattatcttttaaaaaaataatattaacctattttttaaatttaca

SEQ ID NO: 50941 - DNA, 1567 bp, Oryza sativa
cgtggagcaagatcttgaagccccaaaggtggttatgcttgattaccggcagttaccgaccttccaaccgacttaaggaggctataaaagaaggagctcactacactctaaaattacacagcaagtggagtacaactcacttacacatttaggctgagttcgggagtgagcgttgggaaccctcactcccaacatgcaaaacagagcggtgattagtgcataatttattaagtattatgtaaaataaacttgaaaaatggattaatatgatttttaaaacaactttcctatatattttttttttcaaaatgcacaccgtttagtagtttgggaaacgtgcacgccgaaaacgagaaaggtgagttgggaaaagtaggggaagaacacagtcaaagggtgtgttcgggaggaggggttgggaatccctcctccccagcacggaaaatgaagcacgtattattgcatgattaattaagtattatctattctttaaaaaaaaagattaacatgattttttaaaacaacttttatataaaaaaatttggcaaaaacaacaccgttttaccattttaaaagcgtgcatacctgccccaaatgtcggacttctatccgaaggagtgctagagatgtcgacattcttccaaggagttctagaggagtgcccaagatgtcagctctctgtctctctatctctttgatcttgtacctcgttggatgcttcttttacctaagtatttgtgatctcatttggtattaacttttcttatttaagtaagatatattctcatcattccaggttcatcgctgtacttagagtaccttaatcttatataagtgtgacatcgagattggggtaataatcaatagcgtagacatggtgttaaggctagagtttacgtttgtttgttgtgtgctccacgggttgtagaagtagatggcaggtggtaacagccatatccgtcctttgtaattctccatgttcggtacgtcatcgagctgtaggccggagtctccttggaagatcacgagtaagctggtgttcgaaacaattgatagagttttaacttaacttaattaacccataggaatccgctctttcctaagcatcccaattagttgttgtccttggttgaatcttgttcttagattacacgcacatgttccctgtgatttgatacccttggaatactctaaagtgaagtgctacttcggtatccatgttcttgcggatttatttatgactgtagcaaataccaacagcgggccactattatgttgtcgctagtcatgcattgtgcacacattattaatagatgaggggtctcgacaagccattgcgtgcaataggtgatgacatgccctcccaagcaattagagcaagtttaacagtagagccaaatattagctataagatcatattagagttagtatgtatagtagatgggctctaactttgtatttatttttcttctcctctctctttctcatgcatatacatttagtgcatttattttaatgtgtgtgaagagttagctcttggataccatcagctcgccattgttgaagc

SEQ ID NO: 50942 - DNA, 1032 bp, Oryza sativa
cagaggttgataaggttgcagagtaaactacgaggccccaatgtctcctaccggtaacgaattactgctgaaatcgcgaccatctcgtgccatcaaacagtcgagaaattttttttaaaaaaggcagagacacgtgcagctagacgacgtgattaagctctggcaattgatacgtgcaaacgagtaggtgaaccaaaccagccaattcggcgtattggacaggctgatggccataaaagcatacattttagagtaaattttataaaactacaaatgaattcaccaaactatcacaaaactacatatatagaaatatgtatcacaaaactacatatttaaccccaaatttatcgcaaaattatatgtttaggatatcgtatcccaaaactacatatttagtgaagaagtcatagaaaactacatcttttggagtttatatccatatcacaattgagattacaaaagtcttagttttatgataaaactggttttaaatacgtagttttctgatacgataccttaaatctgtagtttcatgatatgcatttttaaaactgtagttttcagatagattgattaaagtacctatagttttgtgaaatttactctatattttataatttgagggaattagacagttgacaagttgagttatatgcttctgattttttattcaaaatgtttttttaagaaattgagaccatacagatagtttctccaagcattgttcaaaaggcatttacaatctaatcttttgaggcgcctaaaaaaaacttatatttataggactagtttattatgttgtagatattgttgaatatgtgctagaaatgtctaataaggtagtaactacaaaattaaactaacgcataccaacagaaattgttaggagaaaactattaaatataaaattaaattcatttcctctcacttctggttcattgatggttatagatacttgcacgggtacccctaatgggcgatcgatcgccgtgcggatggggtagcgatcagattcgctccccacctccc

SEQ ID NO: 50943 - DNA, 638 bp, Oryza sativa
gcacatgtccactcccatcttttgcaacaatgagatagaacaatcagatggaaaggaatcagaatgaatatcatcataggcacttttagtaaaatcagactctttaatgctactatcatcaaagatttttgctatacctgcaagcctgcaagctctttcaatttctttgcagatttaccccttggcttgccaatgtccattctgggatccacttgcagttctgcttcctccttattctgctgcaaccttgcactctgcctcctgtaagggttataaagcaaagttttgacatctcttttcttaattggagccttaggtaacacaggaagagctggtgcttcacaaactgggctgaagggaggctgaatagacaagggcatgacatcaagtacttccatagcagcttgggtctaggcctccagggggccaacatcagactttgttgaatccggagcccaaacacttgtctcttgacccactaagggagaaaaatcaaacattgtctttttgggcaaaacaagagcagtaaaaggattgaccacatctatggcagcaggaacagaactagaagcaagaaattggtgcatggttcccttttctttgcacaagaggtcaatcttctcattcaggccagacat

SEQ ID NO: 50944 - DNA, 629 bp, Oryza sativa
tgtcacatggtattcctataaatactcctaagtcgtcatatggcactataataaaccaatggaaccattacattcaactactaaatttatctctttaggaaaaaaacttaatgaattgatttaacgggagcctcaaggcccacctcgcttgctcccccgaacatagggtgtgtttagacgcgaaaagaaaatttttggatatcacatcaaacgtttgaccggatgtcaaaaggagttttcggacacaaatgaaaaaaactaatttcataactcgcctggaaaccgcgagacggatttattaagcctaattaatttgtcattagcacttgtgggttactgtagaactttatggctaatcatggactaattaggctcaaaagattcgtcttgccatttccatgcaaactgtgtaattagttttttaatcaatatttaatacaccatgcttgtgtccaaagattagatttagtgtttttgagcagaattttttggaaggccgtagtaacgcatgtaggggtgaaaaaaaagctcgggctcgtgagctcagcttgggcttggctcgagctcaaatgccaaaggagccaagcccatgcctccttttcagctcgttgctgaaatgagccaagccc

SEQ ID NO: 50945 - DNA, 1038 bp, Oryza sativa
tttcccggcacggtggggggatgcataaaaaaaattcggaatatcaaagtacctcttaaaattaggatctttgtgtggttactactgagaaacaacgtgttaactaaagataattttaagaaaagaggatagaaaaaagggactgaaactttccagttctgtgataaaaaagagacaatacaacatctgtttttttactgccccatgactttacttgaaatgtggtggcttgtgctttcgatttgaaacctgtgagaaatattcaacatacttttggtatatggacaacactgtgacaaagatacaaaacaactccgtcctgttagtgggggtagttgctgtgacgtggtcgatttggaaagcaaggaataaggcgtgctttgaacaaactagaagaacagttaggttaaaagaacaggtgaaaattagaaaagtcaaataagtatttagaaacaaaatctaagaaagcaggcatacatgaaaattatcgtcagaggtaagcacacacagtgctgtctggactgcgtatacgcagagacattgcatgacatttccatgttcattgaccccagtgctaaccgaactaaacaagctgaaataggaagcctgggttttctttggtagctagtatgtacatacaaactgcacttatgctggatcatatttacagtagaatagtgaccatgctgcctgcaaaacaaacatatataaattgttataagtattcagtagcactatagctgtaaaaatggaccgtttttttaaaaaaaaactatatataaagcacccactataccaacagagggatgcagtgaattacttttctttcttggttacagccttgggcttctgagtgtaacccgaagtggcatgggtgcggaataaagcaaataacataattaactatagtcatttaaaaatagaagttctcaaccagatacgttcaaagagtaaagtgtaatgacactatatttttctttctttcctccattaggcacaacagcttctcctacggaacgcaagagttaatgtgctata

SEQ ID NO: 50946 - DNA, 1993 bp, Oryza sativa
ttaaacatatagacctccaaattacagtttcacatagatgattttgtttccttccttctattcataaattttttgacaatgtcccatgtggcatttaatttaatcagaataaaacctcttatgaaacctgcactaaaaatggcctaatatatgttttagccatttctaccacgcaaagtcagtgctccattcaaggggagctaggacacattgactaatgatgtctgtctgtatttaatttaatcagaatgaaactcttatgaaaccatggtagcaacatatattttgaacatttaactggtcaattggaatcagtacttcctgagtcctttccaagcttgcgttgcagaagtcttcaagtcccccaggtccacgttaggtcaagacggtttagtccctagccattctagtcttaaaacaatttagtccctcgtcagttcgaaaaaccctatttgccaccctgcgaaagaaatctaagtcaccacaccttgttctccatcctcgcagccacccaagcacactgtatgtttgtgacaggcttgaagaagacggcagcatggctatcttcttcgtttttctcctccaccccttccctctcaatgacttagggatccttggatccgaagtctctggcgccagccacagttccaatgcagtgtcgaggaggacggttgtgactttgacattggtgcggcaaggtatcatcaatcatggttttggcattactgacaactccgactttagccatggctctggcatctctggtgtgtttgtgacaaggccatgtcggtcatggctctagcatatccggcgacgataaggcattccggcatggcacggtagagatatcctctccctgtcatttgctgcattgtcatccgagcacgacagtagcaggttgcaaaggcattgcctagcttcttgtgcgatagacaaaggatatgggggcacccagatctcaccaagaacggtatgacttcgccgacaaaagttgcgctggtagctaatggcagtgcaacaagggcgtcatgccttgatctagccttgactgccatcaccttgtagctaatcctcatgacagcattttcatcaatagttaagggcttccacaccaacttgtagagcaatgtcattttagctataatttatggtattatctacaccctcatatcattcattcttcatggatcatacggattgcggaaatgtgtattggcttgactgcaacacaataattgtatggtagcatgtctagagaagattgcagactgtcacaccctgaagttttctctttttctagccttaattcaattaataaattgcctcaagaaataattcaatttaacctcgagctaaacccaaattaataaatgcaattaataattggaaatagcatggtgggatttttcttgagttccccatgtttaaatacattaagaggattattagtggaattttctgagcaaagaaaataattttaataattaaaatcaattattgaaattaaattaaaagttaacctccttttatctctcttttcggctgtgggccattttcagcccactcctccgcgcacacgctctctcctttgggtcggcccgtagccacagcccagctacagccgccgcgccccatctctccctaggtgtaaacatccctccttccaaaaccgcgtagctagcctatcccacttatacataccactccacttacacttttcattctcacatcgtgtaaaagggttatctcgagagtgatatggttgaagggacaagcccttataagttagttccactcttgctaaactagcaaggtggtactaaacatacgtatacaatgctcatgggccacacatgcctcatcctaattgggccaggatgttacatacacccccccaaggacctgatgccccgttgacacaacttacccagatagccacacatgcacattgggaaatgtccaggaacacactccccccttagcacacgtccag

SEQ ID NO: 50947 - DNA, 2174 bp, Oryza sativa
gtaaaagggttaacccaggagtgatatggttggaaggacaagcccttataagttggttccactcttgctaaactagcaaggtggtactaaacgagcgcacacaacactcataggtcacaaaggtctcatcctaattgggccaggatatcacactgggtcgccgtcaggtaggaccactgttgggcccatcttcaaccttcgcaggcaaagccagagggcgtaaccgccgccccgtgcgccccgtccacctcgcggcgcccactttgcacatgtcgccctcttccacgcccccgcaccccactctccccacgcttcgtgcttgtggagggcgtggtattcgattttcgaatcccggccacatctctctctctcctctcccacatccgctacaaaatccaccccctaccggccaagtctgagctcccaccgctatataaacgatcctcgtgatcccctcctccctttccctcttctgccgctcgttcccgtctttctcgaagtggttgtagaggttcaagtagcgcggagcaaggcaagccatgcatccctcattgaacatattatacctatattgcaaatgtctcgctttcttattttataatgtcagaattatccgttataacataagggtatatggttttattttaaattttaaattgaaaaggttaaaaaaaataataagaaactaaccactccagcttgtgtggcaacttgagagaagaggattgagattttagacatcaattctagaaattgatggtcagattaacatgggaatttgatttttagtcccaatcttttgtttgttagaggtggtaaaatttcattgagaatttagttagagactagataaatcttaaatgaaaatagatggttaagttttgtttaggtaaattaaaagaggaatttcctccgaattaccacccatgcccacgtatattttgaaacagtaaatttttaatggcatgattataattaaccctattaaaaatgtcactcaattccctatccccgtcttacgaaaaactctcgtctcccctaatcaaactgaacattttatagccacatcccacaactccccctaacctaaggaccgttcgtgcgcgttcggctattttctgcccttcctcgtatccatctgcgacattacccaccgcgcacggcggcgacacggcagtggccggccggggtactgggcttcagcggctacagcctatgggagtttctgggcgctggccgcggccgccggaccggtggtctcctgacgcgcttccacaaggtccgggtgccatatgattgttgcaattgatgttttcacccattttttttttctcaaaatattaattgcgcgtcaggtagggtagaattcgctatgtgggaatcgatttaatgccgaataaattactcttgtacaagtagaatcgcatttggttaatttggtgcgtcgtctcatctactgaggggatttagagggtcagcctaacgggattgtggaggatttgatttttctttttgttgttggcatacgatgaatcgaggtgctagttttatgttcgtggatttgtttgagtgtgtcctcttaagagagcctaacaatgcctattaactgaagatagacttttgcttttatgcagaatttatctagctaagtcaatattggtagtgaagtttattttcccttttttccctcctggaaaatgcaagtgtagttttgaagatgtggattgtggaatatgctggttgctagaacagttttttgccacattttggttgtcaataagagaagtttgtcccttgtgatgagaacaaacatatagcccttagagaatgaaatttgtagctctaaaaaaaaaagaacgaaatttgtcagtcttgatcaccttggaaatttccatactagactgaataaatccctactgttcttcgtgatactttgagtctacagatatatggcacagtgcagtttcctggtagatgtcacatgaagtaaaaacgttgaataccataagtccagaacttgtgaggctgaggctgtacttctcaaatgcaattactacctgtcacgccctaaaaatcgcctaaattaaaaatgcatattttaaattatttttagaaattattttaaaagcctacaagctaaaccctaattttctaggaaaattttcaacataaaa

SEQ ID NO: 50948 - DNA, 750 bp, Oryza sativa
aaatatggccatatgacttcttgtataaaattaaaagaatacattcatcatcgtgggtggtatctatatttcaacaagatgcatgctaaacggaggaatctcagtacattagtactatctaattaaaggatgattaatcatctgagtcagcacatgatgcattaaatcttgttgacagaaggtgccatttacgcccgccgacaggttgctatttattttgtgttctagtaagtggtaaagaaaaggatgaagtttctcaaattctataaagtatatatatatattttttagaaacatagtacaaacgcaagcactcacaacgcacgcacactaactcctatggacgcacatacgcacaccctacccctttgagcacttccggaagacttgctggcatatcttgagaatgacgaagccaccatgggtgccatgctgttaacggttacatcacctaccactaaaagaataattagccgtaaatgcgagtaccgtggcaaatctaggatttgaacccgggttggctagttccaccacaaggaacctaaccagttgagctatgctcacttcgcatatgatagatatagtgagacactgaccgtactcgagtatattgaagatctatatttcggcataatttaatcgagaataacgtgagaataaatatgaaaactatggaaaagagtaagctattgttaatcacaaccttaccagcagagattatagcatcaagtaacatgttcaacactagag

SEQ ID NO: 50949 - DNA, 1149 bp, Oryza sativa
ccccgtgcagatactctagaggatgtagttccgaaggcctgctcgtccaaaagacccgcgcgcgtaggattttcgaattggggataaacaagaagaaagaagagaaatgggggttgaaaaaaataaaatccccaaaattatggaaaataatatcagaagaaaaatcattttaaaaaattaaaattcagcgggatatgcatttgttcgatcctgagtggttttatgtaattaactttgacttttttttttgcgaggcagcaccaattaggtatttcgacattttttttgcgagaccccattgttacaatgaaaaaagaaattaaatatctatcagcaaaaagaaaaataagatgcactgtatcttggattaccgcaggagatacgagtagatgagtagtacagccgcagagctaaccaactcagacatgcacaaaagtaaataatatggatccatatcttttaaacatgttgcttgaaagaaattgtacaaatttgacgcactcggacaagagacggtgggtttcctctggcatataaacaacatcacgtttgtactgtgtttttttttaaaatatatataaatagacaggaaactatcaaagagcggttgtagtgaaccgacccttggtgtgggtatcatgagtcgactttccaagttttctatacctttaataatagggccaattacacaaatgccactagggtttaccgtatttgtcattctgccactggtttttggtcaattggtagaatgccactggtttcacagttgggcacgccaaaatggcactctgtcgttaggatcaaataattctgttagtcaacacgtttgactggggtaattaccattctgcccttgttctctaggacgcagctacaactccctactcatcagaaaccgccgtcgacgcccatgaatggatcgatctagggttcatattactctgtctcaaaatgtagctatttctagcacaataccttgtcccaaaatgaaactatttatccacctacctcctcatctcgaccaatcacaaccattctcctccacctactttttcttttcaaccaatcacacatttcctcctatcattctcacctaatttcttatattttgggacgaaggaaacttcctccaatcagtctcaccta

SEQ ID NO: 50950 - DNA, 675 bp, Oryza sativa
ccatgccaacacagccaacagagccaatataatcagcccaagccagccaccttgcttgacagcataaggcgttgataggacccccacaccacacaggacattcactcctgtatatcacagaattgaaatagagaatcatattgctggattgacatatactgtaaattttaacagagtaattgatcttctcagttctcacacagacctggaatttcaactgtaacagatgaactgaggctgcaaatactatatgagattcaacttgtactagacattaatatattcaaaacctagagaaactaattcagcagtgaaactgtgttcttctgtaaggaaaatgaatttttgtatggtgtttggtataattacagtctgaaattacactaagcagatggtaggatttaagtgtacttacactctgaaagtctgtttaatagaaacactttcatattcatgtttgcaatgaggtgtttcctgagaatggaaagtcttgtatatggaaaaaaatatccaaattgttctataataataaagaatgtctcatcttttaagaagaatataaggcttatccttgtttttctaagttatttaggtttagtaaataaaattgttctattgatttagaaaaaacactaaatccatactcatgtcacataatcccttggttaaaatatt

SEQ ID NO: 50951 - DNA, 722 bp, Oryza sativa
gggcataagtatatattaatgtgataggtcagttggaatgggaagtttactttgatttggtaaaagagtctcagtttagatctctagaggtgtttgcatcaaagttagttcgtaccgtagaaaatttggatctaaacaaatctccttcttatcattacgttgagaagaattttgtgacatattattctcgccgtggagggggtgcaagtaagagtgagttggtacgagaagacttggagggtgaaggagagaagaagagacctttgcttggaaatgatttatgggaggcaggaccatcaaagagacattgcggtactgatgatgtggatgcagcgagggtgatgaaaagggagttagtacaagaggggcttgatctaagtgaacatttgtcggcgagtattcattggtcgtcgtacggagtcaaccctgaatacccgacagaagtagcaggccaatatgtgaatccagatgattacttttatgtcgaattgagtggtggtcacgattctgtctcagtagaagtcaatagagatgatgttgacgaggaggcaagtgttgagcaatatgatgttgaatttgctgaagactctgatgatgaccgtccattccctccacttactaataatgacaagttagcattagaggaatgtcgtgcgtttgagaaggtgtttgggaggaagccggacattcctgagtttagggacctaacacatgcccatggt

SEQ ID NO: 50952 - DNA, 533 bp, Oryza sativa
agcccaatggttcaactaagttgaagttgtctccatgagttaatcgaagcaatccactgaacatcaacatgatgaaagcacaaagataacacaattttcatgtgagttctagaaagatagctaacaagcataataagcatttagtagttctttaaggacgccatatgcactagtatggcatgggaacccatattttgcggaggaaaaaagtgaatcttttggccgaaagacattggttttacaacttttaacaattagtagcaaacttgaacgtacataggcagcacaaccgagagaaccaacatagataaatcaatagactaaagccacacaggataaattgaaataaaaacgatatgacaagaacaccaccaaacacttcatccaagcatccaaggtacagaacttaaaatccaaaagaactaacaaagaaaaatttacctacatagctacacctgaaaaattgcaacatgaacccacgcgagcaaaagaaaaaaacttcttttcataatttcgctgcgcatgattattac

SEQ ID NO: 50953 - DNA, 1745 bp, Oryza sativa
gctgttgatataaccttttgtttgcgggtttagacttagtctttgagtgatgcgggtcccgattgcttcttctaggatgagaacttaatggggtaaacccctagtcggtgtgcttgtgattgggtaatcaagcttccgttgttctctaataagtctatttggccggtcggcctatgtaattattaagttgttgtaagtcttaagtttctttcatcttagttgtgtttgctatgtataatcatgcttaagatgaaagtgtgaatctagtgcacatcctgggaactagattcacatgagtatgagttaggaatatttgagaggttgtagatctttagccatttttgtcaagtctcctgaatgtgtaacacatctggtcgctgccttcgagtggtttgacgggcacatctcaggctgaagttgactggcaggctaagggctcagcaatgtctctaatattcctctctcgaggcgtcggatgtttcattatgcttgtttgatgacttgaattattcacttcatctcccaaatataatggaagatccggagagcctacgacatagagtctctagctatttgccaaattattgatcatcattaattacaatcttactttggtttttctcataattctaagacaaacataaaattaaattccattaatatgtccatttgaaagaattttttttcagagttaaacttactcatgtaataatatattactctgcatgtttaatattactggtcattctcacatttcaaattattatttttagatcgcggtcttctatcttcaccttttaaatgccatgtataactgttaatcaaagttaatattgcttttgaaaatgattataatgtagttaataagcatagcagtgtaatttgccacatctccttgtttgatgtgaaattttgctagagttaaaaataatataaaatgagaggtaggcaaattttctatatatattacagatgagccatattacaggctaaattaggtggcacgccaacaggcgtgcagatcttctagtatctcctaaatcgaagatccgattccgatgaaacttggacctaaattcatctaaattcaaaatctacattttgataccaaatttgctattttaatattttatttggatttcctgaagttatttaaatgtcatttgcttttcaaatatctccttttatttcaaaatatcctttagccactaaaaagccgtcggttggaactttacgccttccatggggacgttcgcgcggtctacagaccccaacgtcgaaccgttggttgtaaagcttggcataaaccaaacccaaggtcgaagtgcttctcctggcaccctacgcctcgctgcgtacaacggtcggagcttcactatgtcctcgacctccacaccacaccacacagttcactctcaagctctgtgtgattctagccgctccgccgccactcacggttgttggagtaacactttcgccccacttaacctgtataaacctccaatccctctagccgatatgctatctgtcgataccggctagagaaaataccaaacctagtcattatgctctatcatcgactagcacacaaccaaaccctggctaacaccttgctagttaaaacccaactgtcatccaaataccccacctaccaatgttgcctatccactatactcagccacctactctcctagaacctatatagagcctagccgatatgcttccctactccgctgtcggcataa

SEQ ID NO: 50954 - DNA, 517 bp, Oryza sativa
tgactatacaagtatgcttttgtgcattctctgttagtattatctgatagctgcataagtcatcctttggatcttttcagataatgtctgaggaaaaaactatttacaagaacactcttggcgaatttttaaggtttggcacataaatcaccaaatggaacagcaaaactctacagatatattcctacatgcacctgggtcttggatagcaaacatatcatattgagaatatccttgtggaggggtttcaggtcatttaagaccgtgaaggtaaattgtcatgttactctccaatctcaattggtgttatgtagttcttggcctgcttgtcctcttcttgcttctaaaatttaaaattgaacagaccttggattattaggttgtaggatcagtggtactaaagaacaagtgaataataaaaaataattacatggtgataaaatatctaatatatgatatatctgctatagaccataaaaggaaaaggaacacaaatggtacgaatttacagatatac

SEQ ID NO: 50955 - DNA, 824 bp, Oryza sativa
ccccatgtaatcaaactaacacacgttcaatacaatctcggcgcatcgccacccttttacttttgttttgtttcgacgagttcttgctttcgggttgagttgcatcggtttcgatcttcaacaagaggtaaaacttgttatggcggcttgcgttcttgggattagtgcttccatctttatgatactctaatcttgtttatgtaattcgtcgagttatcatatgtcttatataatctctggcaatatcgcaatcggctaacatctgttactagaaggcaaccgactaggttaaatatcgatgttgacttagattatataagatatctaccactctatgacacatccaacggcttgattgtctagatattgtccttcttttcacacttatagctgcatcggttgagtttgatcttatgagtcatgattagaatctcaatctctagcctgcctttggttcccgattagggtaacatcggggtttcagccgatcttacctgatttaactacatttatcttatatacttgattgacatgttaaatctgtcatttatattaagatcttgttacatttaagtatattaggcttttgtttggtatattttacttgttttgatatcttaatatagagtggtatcggagtattagccgatacacgctagatctatctgatcggctatgctatgaacatatatagtcttgctgttaatatatatttcgatctaagtgatttatactgtctcggcatggcgaccgatctatcccaatcacttgatttaagaaacttgtattggcatccataccctgagtggtttgagagggttcca

SEQ ID NO: 50956 - DNA, 750 bp, Oryza sativa
ttgccatacttcctctgatacttgttaataatcttagccgaattcacttgaaaaccccgagcttttcctccatcggctgttcggccagctgtatgtaccatattgacaggaaaaggatttccatcgaccctcatcggcttcttggagtagtcaaactttattttaccgtcttcaatagccgcctggatctgttgtctgaagactttacaatcattaattagtagaatgagacccagagttatgccacttgcaataccttctcttgcccaactactcagccgatgggattgtatgaccaacaggaagttgaatatgtttttcccgaagtaacaaatcaaaaatcttatcagccttggtgatgtcaaagtcatacctctcttcttttccagaactctttacccattggcatggtataaccttcttgctcctaacccactcggctgctgctaccgtggaatcatcatcatcatcatcatcagatccatatatgtagggacagatatgactgacctttttaaagttcttccttgcttctgcaaacctctgttcatgcaaggttaccttctgtgcaagatgtgataaactatcaaagtcctgggacgagaatttctccttgatcagagctatcataccctgaaaaaccaaatcggctaactgggcatcagtcaagctcaaactgtagcacttattcctcatctccctgaatctctgaatataatcttgcacaggctcatcatgcctttgcctaat

SEQ ID NO: 50957 - DNA, 578 bp, Oryza sativa
  unsure (1)..(578): unsure at all n locations
aataagtttttcaataggatcaatttgtcaaattttcagataactttcaacactgtttggcagtttggaaaccatgcgcgcgaaggaatgtgagttgccgattttttttatatataataattaataaccccgtaattaaacatctggtaattgcgtgcaagtaattagcaaagtaggatggacgttgtttttgttagcgtccagatgtggacgctattctctagagcgtgcaggtctgaacgttattgtgaacagcgtccaccatacgggtgcagtcgaaccgtgccaaaccggcccgaacgtatccacctaaaaccaatcagcgccgaaataactgccgttctctagcgaccgcatcctggcctcctcggcaatccctcatcgccaccggcgggcagcaaaggcggcgcagtatgcgtcaccaatcgcacgcggctagctgacgacacgccttnnnnnnnnnnnnnnnnnnnnnnncgcctttgcctgtgcggctgaccggctgtggcgccggcagctagcacacactagagattcatcacgcgagtacgtattcactttcatctccattgatcata

SEQ ID NO: 50958 - DNA, 1067 bp, Oryza sativa
tgaccggtctgtgaccggtcacacactgcgaccggtcacggaccggataagcgagcgcgctgcgctgcattaaatgcggcgtggcgcgctcgtccaacccgcaataaatgcggttaggtgagcgccgctgtgctcacctaacccacacacgtggcgccaacaccacagggggtcggagcgccccagccctcggggccgaaacgggagcggcccgacccctcggggagacagagggaggggtggccacgtcaccctcgggcccgacccccccgagggggtcaggccacgtggatgaccgtggctgcccaaacctctaatcacgatactcccggtcccatgtcaccgacagcttatatgtgccgttgagagtgaaccggcacatataacgacaccccaattagggattctatagtagtgcttgtttggagtcacagttatatttttcttattttcagaaaagtttaaaaaaatcggaaataatcactaccatgtgttcgatcagtgtcagatagatacacggacatatatttgtttgcgaaaatgttcttcaactgtaaattgttttggaagccacacgagcaaaactttcctgaatgttaagttgtaaacaaacatatgcccaatttctaaactgctacgaaggtctagttcttttcttcaattccagcattcaactttctcatttttgttaacatgctttcaaaatgttaaatgatacattattaaaaaaatatttaaaagttgtttaagaaaacaaataaatttgtttttttaactttataatagttaatacttaattaattatgtgataataagtttttttatttcgtgtgtgccgcaatatttgtcatgtaaagaacgcggcctgaaatgttaggcaacggcgcgccacacatctgggccttctccacttctccccacacggatcggggcacttggccaggcaaccacatctgcacgaactcaagcctaccacgcctgtaaaaataccctcgcttcaaaagccgtttcggtttctccgaccgagccacccacccaagccatcccgcctgacgcctgtaacactc

SEQ ID NO: 50959 - DNA, 962 bp, Oryza sativa
tctaatctaatttaactatttaaaagagaagtttctaccgtgtattaaaaaggaaaaaatgcccgagaaaataaaaaaggtttaaaaaacgtgtgaggaaaaaatgtcagaagaaacgctaaagaaaacacgctagaaaaaagtttcgtagttaaaaaaaaacatgcgagaaaaaaatatttccatcgtatgaaaaaaaagcatacgaggaaaaaactgttagaaaaaacactagattgatggacacttggtcggataggatcatcgatttttttccatctcctacacgacttttgtttcgtcatctattctcctgtattgaagatcctgcatatctttgtaggtaattatcagactatttttgtgaagtatagctattattcttgataacatattatatggaaataatattagaaaataaacatattttaattgttatttagagaagagtgcacagtgactctattttgtgtagacttgaccatacgaggtagtgtaggatttgattggttgcaagaatgagattaaaagaatattttagattatatgtatgttgtcatatgaataatccaattattttaggtaaagcaaacatcgtaagtttgccatcatcgaggttgggctattacatttaagatgttccaattttctaattttctgattgtcatcgatatggttatgcatgaaaaacgtatattatcattatgttttttcacccgtcgcaatacacggggcttgtttgctagtctatatagaagttcaaataaagagattcgaaaaaattggccacgttccaaatgaggccctacaatgaagctgtacacattgtatcatgtagtagattgagtgtccattagcgcacaccagtggattttcaaatactagtataatactaccttcttgtcattttgattgtagcctttaagttccgggatagatataaaagactcaattattgtggt

SEQ ID NO: 50960 - DNA, 980 bp, Oryza sativa
attttttcaaaatataatatgaaaacactttattgaacttaaccaattatatcgaggtaataaaatcataataagaacaaccattactggtttctattggtacaagaacctttaaatggatctttccactagcaatattaacactggtacttcctccgttccaaaatgtaactatttttgaggtagccacgtgtattaagaacataggtacaaatgattggaagagggttgtgattggtggagaagaaattaaagtaggtgaagagaatggttgtgattggttgagatgagatggtaggtggagaaataacttcattttgggataaactactgtgctaaatagatacattttgagacggaggaagcagtagaaatattggttttttttttttgcgaacgcgcaaatattggtacgtagtagagaccaccctgtataggaatagctatagtactggttgaaccaagaaattgttttcttacaattagaccttgcttgttgcaactatcttatttgaaattagtcataccaaaatggactgctcatttcagagatcgaccggtcccagtcatctcaatcagacaatcacattaattttaaaaaatcagcacactacctactaacaatatatactaacagatacgttgattgatatatataaatggggacacagggacttgttgcattgtataaatgtcaacttgtctacctagttaattagcaacaacacgagaagactcaagtctccaacgtatatagtatcacgtagttaagatcgatgtcgatcgattcatcatttgtgctcttgtgcacatcgatatcctagctaactttaaattcgcgaacatgaacacgttgcaatatagttagttaagtatgatggaactgagggagctagtattttaaatttatgattctaaactaaatattttaaatttgtttagagcgaaagttttaaaaatttgatctcggttttatctaa

SEQ ID NO: 50961 - DNA, 3009 bp, Oryza sativa
aaaataatattagcgtgtagacaaagcaagtgcttccatttttgctcatgacatatatattcaataatagatcaggcatatgctccatgcatacatgagctgcacacatataattttgtcatagaacgtgcaacatataatacatgctggtgacatgtaatgagaggttgctagttagatcatgtctgtttgtgtgtgtgtctattccactttttaggtaattgtgtttcttaattactgacggttgcgtgttttaacctgcagttcgattaccaattaaactagaggaatcaaagcattccaaggagatactcccaatacatgttcattgatctgtgatctaatcattctggttacataaaaagtcacaagcttcaaatcaattataatatataaatggaagatcctctccatgcatgagctatatatcaaattaattaaatgctgacagtaacgttacatgatgcattatatttgcatgaccaacaaggcttagcatcacacaattaatcaaaactaaagttcacattgtggggataaatcagatgaaaattcaaggcatatatttgatgcattctttgatccttaacaattaaattagtactatattccgaggaggcaagggtggccatgcccatggctccttgttttactctcaagttagttattgcgtctgcatgtggccccaatataatcgatcaacatatatatatgtttttatgacacggttgtatgttgggctcagtgttcatggggtcactgataggtaaggctctccgacaccatcaatcatatttccacatcgatttgatcatgcatctcatcttctttttccagtttccactaatatcaatgtaagaccaggaagaaatctattcccttcgtttcattttatcgagtcaaattttttcatgtttgactaagtttgtaaaattaaaatttagtatcatttactgaaaaaaaaatataatattatattaaaatgtattcaatgctagatttaataaaaacttatttggtgttgtagttgcttctatattttctctaaacttgatcaataaattgcacttaggacaaactcaaacatcttataatatgaaacatgggaagtgctagctagataattaaggttagtttcacttacatggtctatacttttttatttgttatcattccaaagttaattagtaattaaatttgtctggttttcagttttctttcagaaaagttttcataatttttctatcatcatctactgctttccttcacatattaatatatgtagctagattgcacgccatatataccatacatgaaacaaaactcagggtcctcaactagctctgatgattcttaagaactagctaagctagctagcttcttcattctaatatatatgtcttgttcttcttggtaattttcagattagtcagtacgtgggtatatattccagtgctgttatgatcattgctcaaacggacaacgaagaggtagagaattattgcctattagtggccacatgcacaatctatggtctaagattcagcattgaagcgtatatacagtatgttcgacccaattccgacagaaacctgaaagaggctgatcaacatgtacatgacgatggcatgaatgctcggtaattcatcagtgaaaagaaagaactctacatgcccttgacaatgtgttcaatccaaatggcttgaatttttcatgcattttgcaaatcagtgagtaataatatatactccctttagatgcatgcatgcctacattatttcccttgtacatgattgaacttggtgtgtatgaaattaacaaattaatatccaacatgtacagatcgccaatgcatgtgaataattcagagatatgtacttaattatatgttcatgatcagtactactggcagtgcaggtaaagctagccagctgcagtgatactgtgcaacaccaaacgatccagctgaccggggaacagtagctatagcttagagtcttttgccacaccacaaagaaatctttccatgcaaaaccaaatcaagggctagctggaatatgtgtttcaggaaagaaaccaagagagatggagatggagatgcagatggtgatccatctcctgtagttttcagctctggccctctctctctccatcttatattagcttgccaccagtatatgtttttgctgtgactgtagttgttgaggtggttggatcaatcagtccttgaaaagggaacagaggaaagaaagattaaaaaaagtgaaattataggtaagttgtgtgtgattcatacaagtgtggagaaagagagaaattaaagtatttccatttttctctttgagagagagagagagagtgatgctgatgagagttgagacttccttcatatgtaatgagtagctctagcttgttttaacttttaaggtttagggtcactggccggcacactgcctccatccataggaaaaagtttgctctctgctagtactcctctaaactatttcgacggaacacataattaaccctgacctttttggctcacttgaccaaacacactgtttaaaacgaaccactttactttgtaccgacatttcttttgtttctcacaattaacacacgacccatagttctatcactagtgagtgaagttgggtaattttttattatagtttaacggctaaaacactttaacgtaatagtttcaagtactagaataaacttttcggttcacaaatattatttactagtatttatttccttaagaaattttacgactattaattaaggagaaaccgagaggtagtaggagatataaaatttacatttaaaagattactctaaaggatgttaacatagtcaagactagttcatcaactcaaaacaatatcccatctctcacctctcctctccatcccctccaccatggcaggcgctacctccatgtcaacattgtcgttgctgactcaaagtcaagagctagctagccttgctgcggcgcaccactcg

SEQ ID NO: 50962 - DNA, 4026 bp, Oryza sativa
tacggattatctacttgattgtagaaataaattaaatattttaataaatagacctaacaaataactttcccaagtgatatagtaaaatggatttttttttaaaaaaagtgtcgttttcaatgatcgagcaaataatccattttaacgatctgataaataatctgaaaataactaaagccagcttgcatgaattgaatacaaggttatgtatctaatatcagcaattaagaaatcaaggcttgctataatatacagatgcaacgagagagttcacaagtagcaaattaacaaacacccaaacagtgagcacgttgtagtagtcttgtagatcgaatggaattatgcaggtatgcataatccttttttattaatttgttcatgctagctaggtacatgtgtattaattagccaagcccagtacatcgatgtgggaagagaagacaaacagatggatgtgtctgaatgtgcatgaaaacaaattggactgtcagcagccgttatcatgcacgtatatatgggaccatttggctggtagctgtttccgaaaccatttgagtagtaacaattccgtctcatcgatctttggtaggcacacacatctctttctctcaccaggagatccatgatgcatgagtgcatccattggaccaatggactatatgtactttataacatcctacctacaatattattgcacattgacatatttttttttaagcttctttcctgaaataatccagagagcatgaaacataggcccatgaatcactaacaaactactttaattattgctagatagtcatcagtaattcctgatatatataaggtgcactgatctattgagagtcctaacatatatagtgtattaatttggaggcagatatagagggtagcattttccaggctgaaataaaaccagctggtgggtagggcggagccctgctcctttgtgaaggcaagggcgagttcatgttttcacccacgggtccccatgtggtcctaaaagtgtagaatcacacatgcacacatcataaagacaatttttttttttgaaaaaaatatcccttttcactgattttatataaatatactccctccttccctaaatgtttgacaccattgactttttaaaacatgtttgaccgttcgttttattcaaaaacttttgtgatatgtgtaaaactatatgtatacataaaagtatatttaacaataaatcaaatgatagaaaaagaattaacaattacttaaattttttaaataagacgaacggtcaaacatttttaaaaaagtcaacggcgtcaaacattttaggatggaggtagtacatgtttagaagggatttgcagaagtaaacaatttgcataaacatactctcagcgacggtggtatatttgtaaaaaaaaaaattgcatcccggtcatttctttgggcgagtcacatgtgtcgctcatgcccattgatcgagttgtagccgcaccatgccatcccatcctgaatctcgctccactagcatgagtcattggtgcacctcttcctccatgctggcacatccatgatcatccattctagctacatcaccatgtataccaaactaataacagtcctctcaacagctttcgtcagccattatcatgaaggattgtgtcttcaaatggaggtccaaattaaagccactcacagggtcctgacggaggcttagtgtaggatcgtaaatgaccttttacactctaaaactagccaatgagatgggggctacttcacttatataatagatcccttgccattactccctccttttctaaatgttttacgccgttaacttttttaaacatgtttggccgttcgccttattcaaaaacttaggacctgcagggctaggcaaggaagtcagggtcaagggagaggcattctcatccaacccagccataacctgtgccactttgccaaccctaggcatatagaaggagatagagaagtatggtagccagccagagatagaagtatgtgtacatgtaattaatataattaacttattaacagatcgatgtaagcgtgcaggcaactagctagttgtgaactgtgacgtgaccaaggcaaacaagtcaacctctaggatgcaggacatgacccaacaagaatccattcttaggctcaactgctgaaaggccctgcaaggttgggtcgatcaaatttctagccatagctagagtaattaatatacaccatgcatggcacacatgtatataatcaaagagcctacatcatctctttctttgctacaactaatcatgctggattagacaacaaaagaaattcaatcaaatagatccctctttaacctctctctctttctctctcccttactttttctcgtacacacaaattaaagggacacagtcctatcaaaatcgacaagtatatatacacttcctgtcaaaatgccggaaatgccgttgagatatcttgtcaggtaaaaaaaagtgtgaaaatcaggaaggtaaaacattaattttctatcgcgatcttctggaggtagtaaaaagcatgtgttgtcactgtacatgttctctcgatatctcacctaactttcacactccattgtttttcattattttccttattgcaatttatatcactgatgctaattgaacaccatatggacgtgcaagtacttaataatgaacacaatgtatgtactgttatgcactagcttaattcagagtcaaataagaggacagtggcagagttgctagaattgcttgattgtcaccatcttctctagattagattgtaggatagaacatgttaattacttctagctagctgtacaaaacattagcctgtgagttctaatctcacattaagagtacttagctcaacgtgaccaagtaaatctaaataaggaaattttggtgattaggactgaccagtgtcgattgaagccataactgccgtcttgctctcttcttcttctttttcttcttcttcctctagttgatctagttgagggatctcagctccttcgatatcgatcggtgtatagtacgtactccgtcaaatttttctatgaacttagttaattttagagtagtttaactttaatcaaagtcaaaacaacttataatttgaaacggagtgagtagatgagagtgagagatccttgcttgaaaggtgattgtcctcctccttatagcgctagtgtcactgcagggcaaaagtacaaaatccctccagcaaggatcggctgttttagtgttcatgtgaaagtgcgagaggtggttagatcgatgtttcgcttgggagatctcccttttataatcactgtgagaaattaggcctgttaccacgccttccttacatgtttacttatcggatggactaggcccaatgtaatggtgtttcaagattgttagctgagagatcaacaaacatagctggcaggggcggatttaacgtgggttcaagtcccccctacacccactggacctatggataccccctgagtccacccttcaattttttcgccatggttgataacataggaggtgctaaaggtctctgaatagctggaggttaaagaaaccacgtattggtatgttgagatgatgtgtttaatactaaaatgatgtgtatacgccggcgtactcggtatgttgagtcccccaacattttgttcctaaatccgcccttgatatatagccgggtaagtaattattacatgactatgtaactattattggcttaacaattgttcatttggaaaaggtcatccttcagaatggatggatgggtgtcaattcggaagggggccgaacggagacatccattcatatatacagtgtacttcaattttaacattacaataaagtactccattcacccgttctttcattgtgtgtctcaaatagcctgattacctgagagtgaaatctagctagggatagtttgagattgtgagttgctatgacgagttggatctgattgattttagtttcagccaacacacctttaatttgatcttag

SEQ ID NO: 50963 - DNA, 706 bp, Oryza sativa
ccaagctggatcgcgcacgctgccacaactcggagctggaggagaagctccgccagattagtgcggaggggcaggcgtggatgggcgtcgccaagagccatgaggccgtcgccgctggcctccgcgccacgctcgactagctcctccagtccccctgtgccgtgactgccgtcgccgccgccacgaggaagggcgacgccaaggacgcgcagtcgtgctgcttcaagaccccaggcggcgccgccgccgccactgccgccgacgcggtgtccggggcgacgtcgtgcaaggcctgccatgtcacggaggcatccgtgccgctgctcccatgcctatgcgacgcctgcgaggccgccgccgccgcttgccccgtctgcaccgccaccaagaacgcctctgtccatgtcctcctctcctgaagtcactcacacgtgctacaccagccagccactgcatggagtaggagattttgatagcgcaacagctatggccagaccgaaaccgggcatccgtcagccaactccggtgtcaagcaaaaagctaacaacaatcatcctgtcccaagttacatggaaattcatgctagggaagccacggttctgtgcatctgtgcatcagtgatctccgggccatgcgagttttgtcagtggaaacaacagttttcggtgcggtggattgaatggttgattgccaatctcatctgccg

SEQ ID NO: 50964 - DNA, 2888 bp, Oryza sativa
tgggactgggccctttctggaaatatggcccaacacgcagttaacactccctgtttttgtccaacaaggcaatcatgtaaacagagttacagagcctatctgtataaattactctagtcaacagggaagtactcctaaattggtcaacaccttttccttttcctttagtagaaaaactagtctgaactctgaccattccaatattccatggtggctaattaaaaaaattaagttagccggctcggttttgtaaaattattaatgtaccagcaacaactgctacaacttgatatataatgtgcaaactttcaatggggacatgcacaacatatgctattacaagttctatgtttgtttttgactggcgaatatatatatactgcactacatttgactacgctaaagcctacagctagtttttcttaagtagttaacacagacgtgttggtttcattttgtttccagtatcatctgctcccaatttgtgtgcattctcatggttgcttcgatctccaactagtaggagtataattcccttgttagattgataaataaataatacaacatgcagaaatatcgaacgatcgatattattcacacacggacgaaaaaaaattgaattcgattttgttttaatcaacttgcctagtttgattcgttgaggccggagaagtatatactgtggcatacatatgcaattcattaatccctttgcacatgtatgtatatagtttcaatagaaaaagctaggcagcattataattaggttcgcgcgactaatcggcgaagaggttgctccgtgtgaattaattggccaaatccatccaaaacaatttcataaaagaaatatttagaaattaataataagcgatcgactcaccaacccaccatctgaattggagtagaaacctatgtggacagcctttgacaaaagttttacttttaaggagttaacacatgaatatttattaccaagttaagacttagacatttagctacacgctttcttagataccatcttttacgttttaccgaaaaaataagcatagtctatctggttagattcgtgtgttggatatactcagacttggcacggatatgcttatatctatgactaattattttttatggtaggtgatatatatcaaaacaattgagcatctcttcattacttgcccttttgcaagatttgtgtggaatgttttctttagcacctgggtaagtttgaggagaaggagattgggaagatacggaaaacaaggtgagctattagcgcatgatttattgagtattaactattttaaattttaaaaatggattaatatgatttttttaaaccaactttcctatagaaaatttttgcaaaaaacacactgtttagtagtttggaaagcgtgcgcacgaaaaacgaggtgttttctcatcctatctcacacaaacgaacgcagcctaaggcagtgtgccgtgtgaatggattggggggaatgaacaggaaatggtgtttgtgtgtgttgtggacttgtggatgggtttggaaaaccaggaataaagtgtgttttcaaaatgaaagtttctctacccagttgagctgatatattatatttttctctgaatctcttcatggtccatcttgcagaactcgggaaatgaaggaaggctgcaatggggccatacggggtgtgcacctgctaaggaaggaaggtggcaagtgaaatctacacttcaagacatgcatggaggattggaggtcgggggccagtagaccggaacatgttttgggctggcttcaaactaatggggatggcattgttccagttgtgaagtgctgctagtgttttttttctttttctttgcttagcagtaggtttactttctgaactgtgtaaacctttcttttccatcaaagaaattaagagggagaagcctggcatctctgttgtaaaaaaaatgtggcgtatatatcgatggtgagatggttgttctggttttgtcaatatcaagatatgctagcacattcttttttagtgtttatagaggtaaatgtatatgtttgcatttataggggaaagtgatttcatccctggaggggatatccccttatttcgtgcatgacacctaaatagtcataaaaaatatgaaaaaaaaataggcatcatagattaatatgaaatatatcactccacaaacatgcaagtttaaattcaatttctacaagttgtaaaaaaaataacaaatatagttgtgaacgtgcgataactattttcagtttaatttgttatttttattgcaacttgtagaagttgaatttggtcttgtatgtttgtggagtgatatattttgtattaatatatcttgtcaatttttttaaaattttttgataacatgtaaacagcgagtggatatcccctcgagggataaaaatccacatctaatttataagagtgaatgtgttggcgtgtatacgagcttctgtgtttgcgtgtctatagtgttttaaagaaaaagatatattttttgaacgagaaaaataaagagaaagtactagcttgctgtctgtgcagggctatatggttatatataacttcatacatgtgaaatgagttctaaaagaaagcgaataagttcatttgactcttgattccttaacttttaaaaccagtgcaatttaactccctcaaaggttttggaggccggtttcacaaacgtggcgggcggtagatcttcgttccacgtgatgttgatgtggcgtctatgtgacattagaattaaaaaaaatatgtgtgagatcctctagtaattcaaaaataaattgtgggacctgctaacatatggagcccacatgctatccattctccttcccttcttcatccagaaatgctaatgggcgg

SEQ ID NO: 50965 - DNA, 1047 bp, Oryza sativa
taaatatggcacgcatgtattttaagatttatctttgaccaagaattagttttaatttacaaagatatttgatagaaaattagcatcatttcaacgtgtttttcaatatgaatacaataattctatgtatatattattagtcatcaacctgtgcacttgcatgggctagaaaaattacgtgacatcaattaactagcgtggaagctttattggtgcctccaattactaaatataagattttttctttgtttctcaattctttcggtcaaaaacgagcatgtgtgttattcatagaaacggaggtagtatttgtaagaagtacagtatcgaatttcaaaaaagttccgaccttgtgcgataatatacacacatattaacctacataggcaagctagctagacctagaaatataccatttctaaacctattcggtcacttactcacgttggggagcctaactaaactaacatggactcacatggaatgcaagccagccatggtactaactcgtctactacgccatagtacgctacaaacacaactaagttatcttatgaaggactactcaatagtacacttaaaacaatgttactcgttgccttttaccttcatttgacgggtacgacctaagtgtatctgaaaatcttctattctgtccatcggcgaaagcgtgcaaatgtaaaattgcctggtacgcaggactagatatgaagagtttgttcagagattgtgcaacaaacatgtacatccatcaactgtattgtcacgccctgaagtttccccctttttccttgctttaaaaaaatggttaaatgaattgcgcgaagaaattgtttgattaacttagagctaattccttaattaataaatgcaaataataatcggaattggcatgtggaatttttcttgagttctacatgtcgaaattcgctaacaaaatttttagtggaattttcagagctctcgaaataattttaccaattaaaaacattaaaccgcaataaataatcccaggaaaatctttttcttttcctcttttcttttcct

SEQ ID NO: 50966 - DNA, 4443 bp, Oryza sativa
cattaggtgctaaggactttaattagtagaaattgaaatgttgtaaggtttttttgtaaaattgctttgtttgccatgtgggcttatggacctaaatgcaattcacctaatgcccagggaccttgttgtatagggtttagggcttaccctaaaacatgaaattactatttcatgcattcactacttgatataatagcttgatgagtatattgttatcacccttgctttaaccccctcttttagaatcaatttggagtttttgccgaagccaggagtttaatcatataaattagtgtcattctaacttagttcccaagtatagattagatagatggtttaattctatagcaaaacattagagttggctcatcctgtagcttctacagtaatagttagccacaatcttgtaaataccctattattttatgtaaagaaatctccattggagccttaatcaaatgtatgcgatgaagattcagattgttgaacatgtattaatctactgatccagggttaatacagtttaaatatgtcggttaccgaatctttaattttgggacccgacaaggtgtgtgggtgggggcccctacgatttgggagcctagagcggccgtaccgctcgcaccccctcccccctgagccggccctgactacatgggcgttaaaaggccaaatggcatcttatgacgttttctgggcttgatggcgacgaaaatggacgccatagactctatgacgacagaaagattatcactagattaatgataaaaagataagctttctttatagaacgccattagagacgcatgataggtgacgaatcatatttgtcacacgaatgtcacagatttcatagcatgacttaaaattcaatttttatgacgtaaatgagcatcacatataattagattcttgtagtgatggcttgtttggctattagagaggcagtttgagacatacagcacacagtttcatagcgtgtgcgtgcctagttggcaactggatcctagtagatgcaaattttgaaacattcaacccaacccaatccttcttctcttaatcttctcttcctacacttgtgtttgtgtgtgtgtgtctaagaggctagtagagttagctagcctaaaattttttgcacgttgcagctactaactgtgctgctggcttgtcgtcctctgcttcaacattaaagagggagctaatagatcggtgattcactttggtttcttggatgctatccagccacgtcaccatgcatgcgaattttgtggatggagtcagaggctctgcatgcacggagctgatttaattaattaacttgttgccagctagtacctaattaagcatgtgtgttaatttattattaattactttgctagtgttaatttatccttagtttttttattccaaactactagcatgcatgcctttgtcagagaaaccgatggaatatcctcgtttcaaaagtccatgcataatgtgcatgctgtgtggattcgtgctgtattttcctgggtagataagaccaaaaaatcccacttaccaactaggttttttaaaagtctggtacatcgtgaaccatgctgcttcacgtggtcggaactatatacgttaagatcaaatgtgctcaacgtggtctggcacatcatggatcatgctgcttcatgtggtcggatctagatgcattaggaataatccttttcgtagtagtgaaactaaagaacttcacttgccaactacttcctccgtttcacaatgtaagtcattctagcatttctcacatttataatgttcctaatgaatctagatagatatatatgtttaaattcattagcattaatatgaatatgggaaatgctagaatgacttacattgtgaaacggagggagtagtttttttagagtctgaacaaagatgaaactttttggaaaggtgctcctgatgaccaagttcaattcaccaactgaaatcgcacactggatttacatgaaaaatgcgagatagacaaaaatgatttctttcggttctaaattaatactcccggccatttgggaggagcaatatgtacatatgcattcatcacacttcagcttttttgtcttttttttccttggagttttaagaatgctcataattagggcatgcaagttgatccattgatatattcgcaatatttgacgatttttttttcattttaaaaattgttgacgatattagcttaattttggtatggaaaatatcggttaatttatccccaatttttatcaagagagaaaatgaaccatgagagttgaggtgctaattaaccacaagcaaatattcattttaatttgtggtatatatatatacacgagcatgcatgtaaagatggaaatatgtgaaaaatataatggtgctagtagatttgtctaaaacacttccataatactatgatcaggacactcgataaggacaaagttaaattttagcgattgtgtcattatcaaaattatcaatgaataattggccagagggccgggattaagggtctactactgtcctgccatttcattaattaattagattaagtccccgattccttgcatctctaattggcctacgagaaccgacaaaaatcgcaagatgggaggattgtggtaggttatcttctccaactgtgcctctcaagtggccataacatattagccagaaggataaataatcatcaatctgccttcacagttttgatcatctcatgagacatatatataaaccacccattagcaagagtctcctaggtgaattaattaactatgctgatacacatatacttaattggtataagaaaattagtagtgatagttaattagtataaaagcatcaatcaaatggagactattagctagctaggagaccaggcaagcaaagcaaagtattgatcttgatgaatcctccagagagattaattgcatattgccagttcctcctgacctattatatgcatgcaagtgctctctgtacttgtgcggtgcaacgacgagtaagagtgcgtacgtttatagtagaactgagggggtgtgccttatatacgccggacgagcaaagagtgcgtacgtttgtagtgacgtctccaattttagtttctatggtagtgaaatatgcgacgtttgacacctcaaaccggagaaaaactggagctgtgaaatgttttctttttttatatgcgtggagctctgaaatattgacagttttgtttttttctataaaaaaagccaagatgagttgacgacttatcggtaggcactcctcgatggagggagatgagcttaaaaagtttcagtaaatggacccatgcagtggaaatgccgagtggagtggagcagtaataaaatttaaaatgccacgcgcagggcatctcgaccacgacaggactctccttgagatcttagaacagtgtgtgcttgctagctgaactgcaacagtggaacagtaataaaatttaaaacggagatgtgcagtgttcacagaggacgagtgtgctctgtgttctctgcttgtgaatagatatggcgatatctgcttgtgaatagatatggcgagtactattactgggtatacatgattaggacagatgttagtttgttctgcttgtttggagatggatttgggagcaaatgtacatggttagggcgcaaatgttagtttgttttgctgtggaggggagtgggtttttgtcacccccggaatttctatccaaaattccaaacgcttacatgtgcgttaaaccctcgtccaggaatcagccgaggcacataataacaaattgataatagagtacgaataaacagcgaattaatattcacaaataataaatcattacagaggtagatagtttctctcaaagaataaaattctacgcagcggaaaataaaacaaactaaagaacagctatggtgactccactccacaagcaacttaacccggatcaagcctagtcctccagaacatcaccttcactgaagtactcctcctctgatgaatgaatattgcaagaattagcatatgacatactcaacaagccacacagcaaatatgcaagtgcacaggataacaaaggacggcataataaagttcatttgcataaacaacatttaataaatatttaggagattagtaaaacagttgaataattaatcagtattaaataaacactacacaacacacccgtgttgcataggcccaacctcatctgaacaaccaccccggttgtacaaatcaaacctccataccaggaatatgccattccaaaccaggagtcaaattaattaacacaattaccaataatgagtggtgtgagactatcatgaaaaacattgttcaactcacccgtaaccacgcgcacggctattcgaatagttttactctgatcagaggtgtaccactgtacccacaagacacaatccc

SEQ ID NO: 50967 - DNA, 582 bp, Oryza sativa
tttgggatctatgtgactttccttgacctttttcaaccccttctgaaccttcctcaacgtaaacgctctcctccggaatgtcggaaactaaagcaaatgaacaaaatcaacaaaacagtacaaaaacaagcataaacagtacatttggatatttttgacatgtagatctcgattttagatgaatttagcaacttgaaccactcgaatccgagttacgatgatttagttatgaatttccgaagtttaatcgattttcaactaatacagaaaattattacgaattaaataaaggattgatgacgtcacgatgacatcatcgccgaccatggcactggacgacgcgaccaccagcgatagagggctcggccgggctatccgaggacacctacgcgaagaggacgacgacgcgaactcaccggtgcaagaaataacgaagtacggcgtccggtgacgaggaccaatggcagctcggctcggctcgatgtcgacggtggcgctccggcggtctttggcggttgcgaaggggcggacggggtgctcctccaccgtgcgaacccggtggtggcgacggacggcgatggc

SEQ ID NO: 50968 - DNA, 527 bp, Oryza sativa
tccactgcagacctctctgccgctcaccctctctgccgaccttcccgacgccggcctgcaccaccgccgccgcactcactctctcgaccgccgccatccatctccaccgccatctccaccgtcgccgtctcgacctctccgccgccatctccgccgccctctctgccgccatctgccaccctctacaccgccctctccatctccgcctcgacctctccaccgccctcctggccaccgccctctccactggtgccgcctcactcactctctcgaccgccgccgggacctcctcttagtcgccacgccaggaccatcatcgccgccaccgggatctcctctccgccacctcctcctctcgactgggacctccacagtgcgccggccgggactcgtagtcgccgtgcgccgcctcctctgctcgtcgtctcctctccaggtacccctctctctctgatgccgatgaatggaatggtggagttaatggatgaatgaatgatgcaatggaatggatgagattttgttcaatg

SEQ ID NO: 50969 - DNA, 966 bp, Oryza sativa
agggggatttattttctttagtttttcttttagtaaactttgttaattgtttttgttgcttaataattatttccggagctctgaaaattcaagtaaaatttgagggctccttttaaaccaaggagaatttaacaaaaattctccggaccacattcgaatttttctgatacgtattttagtgtttgccaatttcttttcgaattttaattaattctattattccttttagaaaataatttttaattttgggatgaatttatcaggatgtgacacttgccccataagtaaaccgagccaattcatctctctctctccatgttactgcacctttttttcttactatacatattcttgcagtaacgttatcaagtaatcgcggtaacacactatgttactatgaaacttataatcgttactacatcttgtagtaacggcgttacatgattgcagtaacgcatagcagatcagcagtaatacttatgatatagtatcgtggagagccaaatttttaaaaaaccaatctttgaagggtaatatctctcacatcatgtactacttttaaaaaccatttgcaccatgatgttagaaaaaaagtgcttatcaaaagtagatccgtcatgattatattatgactacatttcaatattgttactgcaagtaagacatgatgttactgcacgatgaacatcgcgttactacgttgttctgagacgagagctgataagagtggaggtggtggggaaagtgaagggcgggtttgaccgagatggggagctttgaccgaggtgtggggtgggttttgccccctggaggtaggggggtatagaatagttattctatacccgggtgtagaatagtttttctctctctctctctctctctctctctctatatatatatatatatatatatatatatatatatatatatatatatatatatatatatatatatatatatatatat

SEQ ID NO: 50970 - DNA, 678 bp, Oryza sativa
ataggcaacacttgcttcggtccgaatagaatatcggacctaaccgaggaagtcctacccacgccgatgcaagcgaagatgacggaacttacttctcgccagaggtctcggactaaaccgatgcagcccatgctcgaaattaagaactcgacaggagtaaattagggtggcgatatgttgaaagttgtattgatctagagatagattagaagaaccctagatgtacatatttataacatatttataacctcgagccaatatgaatccccatcataaatgactcatgtttcctaaagataaaacacaagtcctaatcagacactaaccaaactttttaaagataaaaagaaaaaaaatactaaaccctgcataattaatagataaattaagctgccatgccatggtcttcacgactccttcttgaacttggtctcttctggacagactttccatcggttgattgtgttctttccctaaccaaatccactaaagaatcttaccatattttggcattaacacctagccatccttttttttacacctcaatcttagccatttacccatttccctttctcaatcccatgtctcataatccttttgccaaaatatgcctatatgcatctctctatgatctcttatcacgttgttgtgcctctttccccatctttacaaactcgc

SEQ ID NO: 50971 - DNA, 517 bp, Oryza sativa
gtcaaaatttgataggtaatttgagtgaaagtgtaaaaactggaaaatgaaaaaaaaattacaatgcaggtaaaactgaagaagaaaacgagtcttggagttttactctacttttggttggaatttagaagaagaatcgaagcttaatcttttgttcttctttccggatctgttaaacttagttttttttcccatgtaatggcaaaatcttacgtactcgtgactttgtttggctgtatataccccacaaaggtgcagaggccggatttaatctaatctattttttttaaaaaaaaggaaaaacttaaattaggagtagtcttagtataattttatcaccgggatgaaattgtctgagattaagaaagcttcatttatcaaaaagaaatgaaaaaaaatgttctgctactctcaggcctccttgacaagttgctagccacttgatgaacagtttaggttgattgtgcttattctttgtttattgaaatctaaaatgaatttgaaactgaacatttag

SEQ ID NO: 50972 - DNA, 725 bp, Oryza sativa
agtaagcaataaaataaccttactatttaggaacaaacattgtgaaagctagcaatagcaattactaggtagtatggctactaccagcaataagaaactaaactatattattagtacagtgaatagtgtaggtgcagggtgtgggaggctagggattggtctttttttctattgcggggcataccttatgttcaccttttgcattcacacattgtggcatatgtattagctactaccactgattcttgggcccaccttattaccaagtttagcaataagcatttctttttgcctctagggaagaatggcaaaggcgcacttatgaaatgtgaggagagttacatgctatgccataggtacagtgataaatattgtttgattaattttttgaggctgttgtaacgattgatctcgtgcatccaaacttgatacaactgctgtaaatagataatgacatggggcactgtagctctccgccattccaactcagggcatctacaatataaggcacgggtagtagtagccttacgtaggctatactgtctaaagccacatataggaaactctacccccaataaaggatactctcaaatggttctacaaaatctgagggtactagtatcccacaatacgtgtctcagcccacaaagccacagagttattttcctcttctatcctttttctatttagccttttcttcttttgttttctccacctccttgcct

SEQ ID NO: 50973 - DNA, 598 bp, Oryza sativa
cggttaaaccttatccccgaaccggcgaaccttaaccaatccgccgccaaatcctctcgggtcgagccgatctcctccagctttggctataaatagaacccccaagacctcctctttcgtttccaacccctagctcgagctcccgttccctagccgtctctccccgcagccgccttctctctccgccgccggcagccgctccagccgtccctagcatccggtgtagccgtcgcctccggtcgccgtcatcaccaccgggttcgcaaggaggagaagaagcccggccactagttccttttcgccgtaacccgctggaagcccctcgacggcgtgaatccgatctactccacctccggccgagcctcgccgtcgactccgtggtttctggacgtcgtcgtcgctttcttcggcatcgcagagccaaggtgaagcccgtccactggttttcctccgctaaagattgccggaacgccgctgtcatcgtcgaccagtacctcaccgcccttcggagttcgtcgccggctgtctcccgtcgtcggtcgtcgtcgtgccgcccctcagtgagttctcctcgtcgtgctctttcttccggtgcctt

SEQ ID NO: 50974 - DNA, 2744 bp, Oryza sativa
gactaaatcataaagaaattgagaaaatctggaaatttcgggctagctaattacttgctggggttgggggggggggtttagaaattagcgaaattgcaatcacttccttaaactgtcctgaattgttgattaagatgtgaataaatacacgtacatataatacatttatacttcctttgtccaaaataagtttatgtttcatccatccacatgtactaatcaatacaaaaccaaaaatattagaatatccttattttatcaaatcctaatgtaattattctccacgtattttctacttaacaaacttgaatacaatgaacataaaaagaaataaacttattctgcgaggaaagtccatgactttgtgaaagatggtatggtcggcatctccattggtggaagaacatacgtacatgtgtgcaggatcggaacacaccattggtgcaaattaagctgcctgcacatggggaatacgtgcatacgtaatcaagttgacggacacatgtacataaaaaaacgatgattaattactttattctcacaacgcccatccgtctgttcgtctccatgctgtgccatcgattcgcaccatcctcatcatcaatttggccgtactagtgatcgaaggagggtcagccgctaagccaaattggcaagcagtgacatagtttccagaagtaaggagctaaagctaggctgctaaaacagagcaacgaatagctgggctatcccatccggccatcaccctgcaatgcactgaacaacaaaaggatgatggatttcctaaagataggaaggaaacgggtagatctagactgtcaaatattctagatacaatgaacaaaaaattcgaatgatttgaacccaaaaacatatgaatgttacacatgcagtctcaaaatttaaataaattatcggctgtaggcggatagggagaggcactcctcggtggcaggcggagaaatgaaccagcaccgacacatatatacccgatcactactgaaacaattttgtgaaatttgcttaaaaatgctactatattttccttagctcaatagtaggattttttttttctgactccactcctgaacagagaggaagtgctctcccattttctatcatcagaaaggtataggctaccagaacagagcaacagaaatgtaaacaaagactaggctgatcgcatacacaatcaggctgccagaacaacaaaaaatacagacaaaagcatccagctccccagctgggacatatccaacatttcctttggtctagaacagcatcagctctgtacaaatgcatgatcacaaataacaaagagtatgggaacagtcacccttgcttcagagatatgatttcttatggaatataatcaagtacgtacttctgtactaatgatcaatggtacacacattacatataggtggttaaactaagctttcgcgaaacctgcatggaggcatggagacatagaacaaaacactgttgttctctagcttatagaacctctcgattgcagatggacactccaaatatgtcgatcgatctagccctatatatatatgcaatgagtgttttcagataagttgtgaatactatgttaatatatgcgcacaaactataaggtagcagcactgaattgctatactgcatgctgaagaacatggcgagcacctgactaaacactgcaagcgagagcagcacagaattaacttagctagctagccaagctcgatcagtcaagctggaggacgaattgtgggtgccatcacccaagtaagtatatatatctatatatatgttcactgcgtcgagcttattcgggttaattgattgggaattgggattgaaacctcaatttttggcctgagcccccaaaaaatcctggaaatggtatagatattaggatttaacggtgtgaaaattcatgtcaggattgtgtttgcactcatttgtttaaccgaaaatgtgaaacttcatgtcaaaacagggacaaaattcatgttaaaaggcttgatatcaaaataagggtaaaaatacaaagtcctcagaaaagtaggggcaaatctataaatataacgactgtatgtctttgacactggaatagggtaaacacaaagctttagttaaaaaaaatgaatacaatcacaaaattgtaaaagtaaatgtaaaatcaccattgaagtttaatttaaaacatggataagaatatgattgtccctataatatcaacaagctttctacataatattatttgaaaatattactagaatggtacgtaggtctggttgaaaatggtaaaatgttagttttttttttctttgggtcggcttggccttgacaatttaaattgagcccgtgcattttcaaactaccgtgcccggggtttaatgaaggttccaaaagcattcagtcaccaaataccgctctcaagcggttttattgataacggtgagtaaagtgctactgtatacaaccaaaaaccggtagaaagcttagataaattttgctagaattttaaatttgaatttgaattttgaaattggcaggttcaccaagcagtttatcaattcttccagatactaaaggcggtcagcaacagcgataatcgagtggttaccattgtattttcaaacccctgcagtgcattgaacaagtttgcacccccaagtgctttttcctcgacttaaatttgagtatatatatatatcgcagtggatcatggaaatcatgttttgcttgat

SEQ ID NO: 50975 - DNA, 756 bp, Oryza sativa
tgtagttacatatatatatatatatatatatgactattcaccaatatttaaatccgtgtctaaattttgcgcgcatgcacgtacattttctatagactctaataacaatctccgtaaggaaagaaacattgtgtttggtgtacacgtcgtctttcattaaaaaataattttgaagacaaaaggttgaaaataaacctgcactactaattttaatttaaatgaaaaaaaagaatcttctcatgagccatgcatgatccctctttattttttcaataaaataaaataaagatccatgagccactccaccttagctcctataaagactccccccctctcccctcccctttcctctaaaccccttccaataatccctcaccaacccatacccccacactccctctcacactccactctagctagctaagctaccttcttactccatttgagcaaaccaaagctcatctagagagagagagagagatctagagagagaaaccagcaaccactcttcctccatctccatgagcaagagaccagatcgttcgttctagattgttctagctagatagcttcatcgtcaaccttggcaacgccaagaaaattaaccagcaagaacacaagaagcggcggcggcggcgatggaggtggcgacgatgctgacgctgacgctgctggcgtactcggcggcgatgctggcgcggctgctggtggcgcggtcccggcggcggcggtgctacctcctcgactacgtgtgct

SEQ ID NO: 50976 - DNA, 2010 bp, Oryza sativa
tgaacaaatcagttatatacctgtaacaatcatactttgttactatgattcggcagtaacattatcttagaagggtagtaacatcatatgttactgcaaaaatgtataggttgttactgtaaactttataggttgttattgcacttttggcagtaacaatataacgaaatttgcagtaacagagaacatgcatagtaacagtgactctatagtagtaatgtttttaaaatctcaatctttagagagtactaacgtacacgtcatgtcttatttttctaacccatttgtattgtggcgttcgtaaaaaaagtgcttaacgaaactagaaccatcgtaactattttttaacgttgttactgcatattggccatcgtgttactacgctgttccagtgagacgagaactaaaaaagaggtaaatcacaatctttagagagcaatatctctcacatcatatcttgtatttccaatccgtttgcaccatgaagttcataaaaaaacgcttaatgaaactagatccatcatggctacttttttacgttgttactgcgataatgctgtcttgttcctgcaggatgaccgtcctgttactgcacgattcctgcaagacgagagcagcaaagtggtgggcgggtttgaccgacgggaggacgctttgaccgaggtgggaggggggttttgggccctagggagggtgggggaggtgggtttgacccatgggagagggggtgtagaatagtttttctaggggaggggtgtagaatagattcactatatatatgtgtgtagattaattaatatttatatgaatatgaataatactagaaagccttatattatgaaatggaggaagtaccaccgaaaatagtgtgcctgaagaccatagcaaaacagtgcttctttgtactgtgtccatgaggatttttactgtgggcggcgaagtactgattgaagtaaatggatttaatttgttcggggatctatgaacgagtagtggaaggctggaagctatgggctaatgcccattactgttgccatccgtttagttggagacagccctaacggttgtggtcaaccatatatccacaccacatcaaaggtatccacacaacttcacgggagaggtgtctcaaactccaccagttattgaggatcaggattctctgcagtcactgcaccgtacctttatcattgatatgtaggtccgatgtggcgtcgggtccatatgtcagtgataaaggtatgctgaagtcgactgcataggatctcaatccatcattgggaggtatgctttcatatatattttttttatcacatgacagacagacatatattgtcacaccctgaagttctcctcccaagcctaaaatttaatttataaatgactctaagaaaatgccggtgcaaatcaagagaaaaccctaagaaagtaatacaaataataatcgaatctgacatgtggaatttttcttgagttctacatgtcgaaattcactaacaggatttttagtggaattttcagatccctagaaataattttaaccaattaaaattgagcaagcaatattctaattccagggaaaatccctttctcctttttctttttctttttcccttccctttccgaatgggccgccggcccattctctcctttttctccccctcctccctgagccaggccgccccgcctccctcctctcccggggtcgccgacaggtggggcccacctgtcgggtcctcccccaacctcccgccgcccgcgccggtcaccaccccccccaaaaccgctgccgccgcgccccacctttcccgctttccccgcgctcacgccgcgtcgcccgcgcccacgccacgtcgccgccccctctccccgcgtctcccagccgcgcccgcgcacgagaggggcgggattcgattctgaatcctcccccaccttccctctctccttcctcacgtcgccggcgaaatcggacgcgctcgggtcgttcccgacctccccgcccctataaaa

SEQ ID NO: 50977 - DNA, 923 bp, Oryza sativa
  unsure (1)..(923): unsure at all n locations
ctgactgggccaagcacttgattggatgaggcctcaggcagctgggtaaaggccgctggcttcaccgtcgtccttttccccgtcggcgttcgcatcaaccttggtcggggtcggattgggccccaccccctcccaccgtcgacgttttgggggtcagcgtcggcatcagcctcggtcgagttcgggctcaccccccctcccccttggcgcacaagtaagccctcggtcgagtttggcattacagtagcttttttagcaaaacatttgacaaacccccggcgcttgcagttgcaggttgcgtcccgcggcttcctagcgcaccctgtatatacaagggacaccggcctctgccttaccccaaccaccacaccaatctcctcccatttgaatcctatctaacaaatcgcatcgcccaatcggatcggatggcttccgctgccaacgtgaaacttgaggatctcggcgccgccgtcgacgagctcgaccagatcaggcaagtgcttctcctcctctccccttcaattggttctagtcagcctcgtacgtgaccattatttcatccccatttccttgttctgatttcccacccgtggaagttatcctccccggtacacagccaaagattttnngatgttaatggtggtggtgtttgcagcagcggatcttagagctcatcacctcgtggagcacacttcaagctcgagcgttccaagctcggtcatggacgttcaatcactgcttccccaagccatgaccatgagtatctccacgcctgagctgctcttgcccctcggcgaggggactctggacgacgtcgacgacctcctcacgcgcgagctgcgcgtgccgttcttggctctgggcgccgccgccgcgccctactccggcaacggcagcgacggcggaaaagcgcgcgagcacgg

SEQ ID NO: 50978 - DNA, 2189 bp, Oryza sativa
ataattacaaatgtaaatacaataatcttattttcagaaaataaaacttgtttcatattaaaagatttgttggtcaaacatttttaaagttaaattttatgcacgatctggcaggtattgtaagattaatttactatatatacgtacaaccgtgactaacttggattttgattgtatatatttctctttagtctcgaaatgtataccaactttaatgagagacctccttttcactcgctcttgtggacacaacaaatagataccaacattaaactgtttcccagctgccctattaaaaatgtgaagttcaattttagtcaataacgaaagccctattgttgctccaaaaaaaagatttgcggcttccttaattaaaaatgtatatgaagtaacttaacagttaagattaaaccatttatgtggctgcagctactggataaggatatggatttagagagacaaattttattttaaaaagatcctactttctactgaatttaataaagcatatattaatttagataaaaaaacttacaaaaagaaaataacaaagagaaaagaaagggaaaagtccatttgatctggacagctggcagttaacaatgccctctgtactaagtacgtactgcccctaactacagagttgaagttatccttgtggaattatatggcatgacgacagacatgtgaccgtccactgaaggggattgctgctgcgcgcgtacgcgccagcaaaaaaagagctggcgagcactccctatttttagtcttaactacttaatatacttaatattaataatagtaattagaaaagattttgaaaattctttttgggagctttttttattaacagattaaaattttttgaagttagatttgaaaactttcgatttaagtttcaaattttaaaaactttcaactagattcgaaaactttcaactcgagatttgaaaactttcaactcagatttgaaaactttcaactcgagaatcgatattcgaaaactttcaagtccggatttgaaaattttgaaaacttttaacttgagatttgaaaattttcaactcgagatttaaaaactttcaactcgagattcgaaaactttcaagtccggatttgaaaatcttgaaaattttcaacttgagatttgaaaattttcaagtcgagatttgaaaactttcaagtcgagattcgaaaactttcaagtccgatttgaaaaaattgaaaattttcaactcagattcgaaaattttcactcgagatttgaaaatttcaaggccagatttgaaaattttcaagtcaatatttaaaaactttcaactcaaaacatttgaaaaaacacgtgctaaaagatttaaaaaagtaatatgaaaaaagcgcaaaaaaaagtgaaaagaaaacacgaaaagaaaaaacacagaagagaaaacggaaaaaccggcgctagcggaaaaaaaattctcgcgcgcgcgtgtgggccttgtgggccgggaatgcgctccggcaacgcacgcgcgcgagttagtaaaaccgtccactgaaaacctgtaaactatgaatttataacaattctttcggttgccccgtttctttttatttaaaaaaatcttgggaattcattcatgggcaggtattaataattaatgtacaccagtaattatcacagggagtggaaccatctttgtcgtccctttgtttctttggtaccaaatcatgaaaaggatatttataataggtaaaagtacgaattacctcctcgaactatcgtggtcgtccgaattatcccctctgaaccacgaaatcagacatttttcaccccaactatgcaaactggacgaattacccccttgacccaatccgcggtggctttagcctacgtagcgtatacgtggcaatctagtcagcattttattttatttttaatggtgggacccacatgtcagacccctctttctctctacccctctctctttctctctctcttcctctctctctttctctctctgcgcagggaggtggaggggatgggggagaggcgggcgtcggcgggtcgacgagctcggccggctccggtggcagcggcagcggcggcgatggcgtccgcggcgggacgtggagcaaggcggcggcggcgacttccttccccaccgtcgcggcggcgtggagctcaaacacgccggcactgtggc

SEQ ID NO: 50979 - DNA, 817 bp, Oryza sativa
ctcaaagataaatgatatgtcatcggcatttagccaatcggctatcatttatggatttaatcacgatttctttgtctttgtttcttgttgattgcaggatcaaatcaactggcacgctcatacatccgaaggcgagttttggacctgcactggagttaagcagatttcccaggcctcgtgttttccatcaacactatccactgtaaactatgaatttataagaattctgtcgggtgtcccatttcttttcatttaaaaaaacttgggaattcatccatgtgcgcaaatatcaatgtacaccaataaattatcaagggagggagaccatcttttgtcccgaaattcctaatgcgcgatcgctcgcgaggcgcgatcaccctctcttccacgtgtttcttttttttttgcaccacattactttcctattttattaaatttatacacctaaagtttgtacacctcaattttacacatctaaagtttatacacctaaagtttatagacccaatgtttataagccaaaagtttatatacccgattcaaatttaaatttgaattcaaatattttttatatatagtatttctatacatctaaagtttatacacctaaagtttatagacccaaagtttataaatcaaaagtttatatacccgatttaaatttgaatttgaattcaaatattttttatatatagtatttctatacataaattttctttgttttttattttttaaaaatttatggtgtagtaggaagagaagaaagggaggaggaagggggagattagtgtgttaggggggggcgatgggggggggg

SEQ ID NO: 50980 - DNA, 2203 bp, Oryza sativa
tatcgaaaatgtttggctaccgcgcgcccgacgaagagaagaaaatatcaggtgcatttcccaaccaccaccacctcgctcttatctccaaccgatgaccaaaccctcctccctcgcatggttgctctcctgacctgccgcgtggtcctcctcctccggtccaccatccaatggctcaaggcggagccactgacggaggcggccccgcgacttcctgtctcgagcgttgcagcagaggcgccggcaggacgcgaaggggtgcttgccgccgccgccgtggcggtcgtggcgtccgagctaggcctgtgactggtgctcccttcccttgcggactccggcgaggtggtcgacgctccagtgggacagatctcagtacgctccggcgcggtaggtgctggcgtagtggaggagcgagggcagaagatgagattactcgaaggtgaattgcgccttgcttcccactgcacgattgatctcgcgatcgtttcttatgctaaccactagagtggacgatcgaatatgtagatctaggttttcattttgaattttttgatgttttagttcatgtaccatgatgttttatgttagatttgaaatgttgttgtaggttttcgatggtgtttcattctttttatcaatgtatttggatatttgtttcatgttttaatacaatcgaaaccgttgtttcacacgttataacaaaatgtttcttagtgtgaatgattgtgtttcaacatattcagcattgaaacatttttatgtaaggtgtttcaattgtctttaattctttgtggatttgttaatatttcaataattgaactttaatgtttcatgtttcaaaacaaattatttcagtccatgattcaaccgcacgtgtttcatcatttaaatttatctgaaacatgagttaaactagtggtgaaacatttttcttacacgtactgaaataacgtccggaattttacaacaaaaatcggacatccaatttgtaggtgtttcgattgattattttatttgattttatattttaaggacccattactaattttctcgtgggccacccaaacggccaaacctcctcatgactagactcggataggggctacatacatgagaaattaggaggacgagaagagagaggtcgctgctaccagatgggaaggcgagctcatcgtgggctaccatggggtttgattactcactacttgatcaagtataagattccgacaggtagtgaattatcagtggtgatgtacataataaagctagagttgctttattaattaatcatgccattacaaaactcgaaaaggattcatgctttgtcgcggtgccggttcaaagttcgttttacgtacctttcgcattctcgtcgtgatagttagcacgacgacgttgatatgtacacgtgattaagaaaaacctaggagtagtacttgactagaaaattaagctgtcttgaagtccacttagattgtaggaaaatgcaatccaaaatttctaaaaatattgaatcttctagtttcagacttgagttccagaagcttttagtagtatcaatctatggttggccatgatgtacatttggtgatgaagtcaagataggagatggatatctctatcagttcttccttgcttcactggccggctagcttatgggataaattccacagatcctaaatcattagttttgatgctaagcttaattaattagtatcactaatccatcgcagattttttggtatggaattattagggcaggtcacgaatggatcggggagaaattaaccttttctatcacccggttgggtttatgaccttaccttgaattctgatagtacactcggcatgtgttttttttttgtctcttttactgacttattcttaatttgcagtcaaccatgtattggtatgttgatcgcctcccattggaaggaaaaagatagtcatatagtacgatagatttcgtaaaaaatattcccccattccctaaatgtttgacgccgttgactttttttaacatgtttgaccattcgtcttattcaaaaacttttgtgaaatatgtaaaaatatatgtatacataaaagtatatttaacaatgaatcgaatgataggaaaataattaataattgcttaaattttttgaattagaccaacggtccaacgtgtttaaaaaagtcaacggcgtctcacatttaggga

SEQ ID NO: 50981 - DNA, 2892 bp, Oryza sativa
aggaaggggggggaaaagaggacttcttttaggtttttctttttataaaccttttcaactttgtttatttcttttcaattattatttgtgctctgaaaattccactaaaatttgagggctccttttagaccaaggagaatttaacaaaaattctccgggtcacatttgaatttttcttgtacgtattttaaggtttgccaatttcttttcaaattttaattaattctattattccttttagcgaatgatttttatttcgggatgaatttatcaggacgtgacaaatccaccctccttacaagaatctcgtccccgagattcgaggaggctagcaagaagataggttgggcggtcttttcttcttgtctgacttcttccgtcgcgtcttgacaaacttccagcaaaacttcaccactcggaactgcttggcttgacctcctgttgcggatggaatcttcccttcacctgactggaccagggtgcaccttttggctgactcagactaggttgcggtagtgcagtgatgcttccgttccagaacttctcatgattcatatcttcggagtcaacctcggacaagttatcaacttcaagttctggggttgttacctggttgtcattaattagaatccaatccttttaattggtttttacttggcccccaattcctcgtattagctcccttggtctccgggtgatagctacttctgctatttgatgcaagggtcaaccactctaactataagttatgcttcccaagagagccaatttatcccacttgacatactttgatgtttttcccaatgactttgctgctggacttgttattgtctgaacgtggtcctgccagacctgaagcttcgttgttggaggtgattttaatctgacctctgtagactatcttcgatcatatcacttggttcataactgggaatagctcccacgaacaagcaacgcggattcactttctttatgttcagtttacttcccattattatcttcaggttgtcctcagttagcattcaacgtattcctttacacctttaaccttgatgtgttctttcccattggatcatctcccaagacatggcattacctggtaaccggtgcttgcacttctcactccgtgtagcatctgataccgagttgaagatttcactccttgccttcatagaaacatttttacctaggtcatctcgcttacttaatgacaaggtgactgttgcggggcagttactatcaggggtcgtccttgagcgatgcaaagcatgtttctgtttatcaatcacctttcggcctacttctttcatgctaaagaacatctttgccaatctcttttatcaatcatctttcggcttatctctaacaggtggtattctttaatgtggattgcggacgcttctggggacgatgaggtcctttggcttgctgcctttcagtgaaaccttgatgtggtgcgtcaaaagctgcactgactaccttcagggaaatacattgcctgctatctgtatctataccactagggtttaattgccgatggtcatctttagtgcttcctcgagatggggagcatccaaattgttcttctgccacatcacctttgacctttttctgataccagataaactaattaccaaccatcgactattatgttctcaaatattgatgtctcctggatctccttaactgttggcaggtatatccgatcttatcaatgtagaggcatggcgggtacccttaggggtttcctccaacaatccttatcttgatctgtaaaaggcgtatccaaactcctatcctcaactactgtctcgttggctttttaacccaacacagtttaattgtttttcttttctatccacaggttggttattaactcgaggttagtatatagttcctctgacacgagaccctaggtctcctttgtcagtaaacaattatacacatgatcacatatccgcatcttccaaaagaatcctcttagggaacttgtctgtattacacatttctcccttattacacgaatacaaggcactgccttaaacaaaaagggaaggtgcttatcatcggtacattgtatcctcaacatgaatcatctctaaacatagcaagctcactgtttacagacatgattatatttatgaattacatgattgctgcaaactttcgagtacaccatgataagtagcgaactaaaaaccacaaacatggctgctcattttgattctggagagatatagctggcattgttctagtgactgcatccttgattggttctgtgatgatgtgataggactgcataatgctatcattcacaggagaagcttccttctgattgctggttgaagcggatgacggtcttctgcttggtatcgccctccggaggttgattgcccttggctcggcctggagtaggtcggggagagacacaacttcttccatctacgacaattctttgctgaggctgtcgatgcagagaatggttgctaagttttattgccgagtcaggtgcagcaggaggagcattggtgcattgtttctgctatgggttctgattaacacgaggccttacgggtacggcgtttgctccagtgaccacaatacgattggaatgtctgcttcgtgtaaattggcggtaatgtggaggtcgattttgccttggttggggacagtttttggagtaatgcccttcttcactgcagttgtaacaaacaataactttcttacactcgggttcttcatcttgtacttgatttctcagctgctgtattgggaacttttcccaaaaaaaagggggtttaaaccccaaaaaaaaccccggtccccaaaaggggaaaaagatactggcctctgtcttgtcagctggtggctggggctgaaattgagcattga

SEQ ID NO: 50982 - DNA, 1106 bp, Oryza sativa
gtaaattaatcttacaatacctgccagatcgtgcataaaatttaactttaaaaatgtttgaccaacaaatcttttaatatgaaacaagttttattttctgaaaataagattattgtatttacatttgtaattattttttatatgattataattttatacgagaaattataagtcaaagattaaatcttgaaggccatgcctttataatggaatagagagagagtagtgattaattaaattggcaatgttttctaaaaattactagccttcgtacaagtgcatcaattaatgcatacgccgaagtgtaaaaacattttcatatattgttaaaaaattaaaagtacaatacagttaattacctctcggttttcatgaaactattattgatagacctatgaaacaaacaaaaaaaaagtagtagtaaacacacttaagtaggaggaaaacataggcagtgtgactaaaaatcgacacatatgcctccagtcctacatatcacatgtcactatgtcagacactcagacgtcttgcagcatcgatcatgatcatgacgcatccatgaaccatgtagatgacttgtaatcacgagcctaggttaaccatggtgaggccggccagcagcagcacgaagagcgcgaagctcgccgccggtgaggctgtggcggccatgggcgcggcgagcgagcccgcggccagggacgcggtagcgaaccccacgccacgaaggcagctgcgacgaacgtgctcgccggcgctcgccgcggccggaggagggtcgacgccggcgccgctcgccgcattactgtccacgcgcacgccgacggcctcgtggtcgtcgtacgacggagtggtcccgcatgccgatcgagttggttgacgcacgaacgctgcactcgccaccgccggagtagccttcgccgccgccgttaggacagatcgtcggaggaggtgcgctcgccgccgtgccgcctacagctgtctgtcaagcaagcttccctgggagacgacgtcgaccgcgtgcccggtttaaatagaggggtttgagttgcgtgcatcaacagttcaaccaaaaatagttacatgcacaatcagattaattcagaatt

SEQ ID NO: 50983 - DNA, 3536 bp, Oryza sativa
ctaaaaaagctactgtaatgccgaactcgaccgagggcttacgtgtgcgccaagggggagggggggtgagcccgaactcgaccgaggctgatgccgacgctgaccgccaagacgtcgacggtgggagggggtggggcccgatccgaccccgaccgaggctgatgccgacgccgaccgcgaagaggacgacggtgaagccagccgcctttacccagctgccctgaggcctcatccaatcaagtgcttggcccagtcagtgccctgttcagaatgacgaaaaattcaaacaaaattcgcagaatttctatcgaaatcggtgcaacctgtgtgttggatggagcagtcaggcgaggtgaaataaggagtactgtcccaaaataagtgcagccatagatattcgtgtacagcgctttgaccatctatcttatttaaaaaatttataatttttttaaaaaaattagtcacacataaagtactattcatgttttatcatctaataacaataaaaatactaatcataatcttttttaaataagatgaacggttaaatgttgaacatgaacaatgctaaaactgtgcttattttggtaagtgtgtaccaccccttcatggtgatggtgaattccggattcgttgcaggaaaagaaataaggaaagaaatctgagcgactagacgagactgcaatgaatagtattttagtactcactccatacagatttgatcatactctgtttgattcttaaaaaaaaaaagttgtttggatggaactaaaattaaattttttagtccctatcatatcggatgtttgacactaattagaagtattaaacgtagattagtgataaaactcattccataatccttgactaattcacgagactaatctattgagcctaattaattcatgattagcctatgtgatactacagtaaacattctctaattatgaattaattaggcttagaaaatttgtctcatgaattagctcttatttatgtaattagttttataagtagtatatttttaatactctaaattagtgtcaaacatccgatgatccaaacaacacctaagcaaataacaccaagacatccatcattctgaaattaagggaaaagaactctgctttgggaaaacgcccacagatctctggttagctccacaaggtggtgggctaatattcgcttctttttttaaactctgctttggaaacggaagggtgaagcatggaaacactagttgaaagatccatccattatcttattttcatctccaaagacacatcggccaagtcacctatactgaaagtgttttcggaacgatcaggtctaaaacatgaggattcagtttagaaaatccaaaactcacatcacatgagccagttcagttctgaaactcttaataaaagttaaaattccaagaatctgtgtgatggccccatccacaatcttgaaagtgcataaaatcaacttaagagtacatggctgataaatccatttgtgaaactgtgtcctggtttgctgtgccaaaacttttcttcaccatattgctaattaacttatcttggagaacaattaggaaacatattcatcaaatagatctgcgtgtcaggatccacaaatagaatagtacatctgaggagtttgtcgacagtgacaacacctaattaagcaagacctgactgtagttgtattacgtatgacaatggcaaggccatgattaatataatactgcagaattaggctcactaagcttgcgctaagcacattgtcaaacataatctaatcggtgaaacaaacccggcatggaattaccaccagcttagcaagttcttcaggtttcaaacttgaaggttccgttctaaaatctgaaactcacattattagttattatgctatacgggcctgattagattccctggcaagttttttcaccttgtcacatcgaatatttggacacacgcatgatgtattaaatatataaaaaaaattaattacatagattgctgaattgcgaggctaatcttttaagcctaattgctccatgatttgacaatgtgatgctacagtaaatatctgctaatgatgaattaattagacttaataaattcgtctcgcagtttacaggcggaatctgtaatttattttattatagactacatttaatacttgaaattgaaatgtgtgtccgtatattcgatgtgacacggcagaaaattttacccctttatcctaaccacatcctacattatcgatatctctgtttcgtggcagcggtactttgttgcgtctgcctgagaaggatgaacgagacgttcaatcacacaattggctcaataccctttcgtgaagtcagcagtgacagtgagctctatctagcctctagctaagcaagctgaccttatcgtgacgacaccaggtttaccacaatagtactacggattggactaaagtcgaaattaggcttattaagcttccgctaagcatcacaaaaacatcgtgtaatcggtgaaattagtatctattaataggacaagatgaacaccaaggttacgccgtgtttaataccaaagttattctttaaacctccaacttttatatcacatcaaaacttttgaacacatgcaaacttttaactattccgtcacattttttcaatttcaactaaacttttaatttttatgtgaactaaatacagccttaattaagtttgtttctggtaatcatctcagaactcaaaaaaaaaaaaccgcctttaagctctcgacatctcaatctgaacaggacgaatgggatagccacttgcccatttctatcacagaacagctggaatgtgcttctgtctctttattggatttttcctctgtaggcagaccaaaccgcaaatgttgaaaaatatggcgtgtgtgttctatatttattcctgttatatgctttcgtacgaagaaatccttttcgaggagattttatcagaacgcaatacaattctagtaggatcatgaaagagagaaattctggagcgtacatatatcatgaaagagagaaatcctgagaatttgaactttcagcaaaattcgccatgagcatgttaaaaatcatcccacacgaaacctttaaaacatccatcgatcaccattcaccatgttgaaacctaccatttcctcccagattatttaatcgattagccacagacaagagggagttgaccccacacactcacacatgctccatagcctattgacgatatatccctttgacttcacacacggggaacgccggaggccgccagcgagagtccggcgatcatgaggacgaagagcccgaatgccaccggcgggctgacatcgccggcggcgaccatggtgacggcagatgaggcggtgacaatccccaccacggctgaagcaaggttgctgccacggccgccgactgctcttttcgcctctatcgcttcagcaacgaaatccacatcaattgtaacctgcggggattgagaataattgaaacgtgttgaccacaagaacattagttaaaaa

SEQ ID NO: 50984 - DNA, 837 bp, Oryza sativa
aatactctaaattagcgtccaaacatccgatgtgacatgggctaaaaagttttagtcccatctaaacacccccttaatctgaccatatataggggatatcttcatctgaccaatcagcatggagtcatggacaatgacatgtttgtcatgcaatccaattaggttgtgtttagttcagcgcaaagtttaaattttggttgaaattagagatgatatgactgaaaagttgtgtgtgtataacaggttaatatgatggaaaaagactgaagtttggatccaaactttgaatctaaacacagccttagaaaaggataaagtaaagcatctccgagaagtactatgagcgctgtctcttctccagatttcaatcctagaactgactgtttgagcttaatacgccacccgccgttcggaagtgatttttggctgtgataactttctcatttttcattagcatgttttttacactgctaaattaatgttatgttttttgtaaaaatttctgtacataatgtttctttaaaaatcaaataaatccattttaagtttatttactaattatacacagataatttatctcgtttttacgtgctgctaatacgttaagcctagcagccaagtcaaactcaatggaacaaacaattgaagccttgtttttttgccacaatgtagctttcattagccacaacttatatctaatatgctaatactccatatgcattcaaatactgtcactggatatataccaattaagagtatttatcgatcttggccgctcgtttttgaaatgtatgtataaatacttccaggaaaatgatcgatgagtaatcgatctct

SEQ ID NO: 50985 - DNA, 682 bp, Oryza sativa
agttcacacggagataaaatgagcagatcgatcacgccgtcacggcagccggagagaggcaacggcgaggtggccgttgagtggtgacgctaattaacaacagaacggagcagaggatgaccgatccccttcgacacactctctgtgtgtgtgtgcgcgcccgagtacccacccaatataatttttcctcgttcttgcaatctcgcctcatccgtccaggcgtccggctcttatcagtgctgaacgcgtcggatcatgaaaccggttgcatcgatatacgtgcttcccttcggaaaatagggtgcactaaagatacggtgagcccataattatctttagttttttataataggtagagatacggattatgtatcaaaatcatgataaaaatatcttcaattttataatattagagatttttactaaatgttttataatacacgaatgatcatatatatttttaaaaggagggagcaggagaagtcaataggtattctctaattagtgctattctgtgaaactaaaccatttggccctatctttttttatcattttccctttttttcttttattaaaaaaataaatctcctttccatgatttggcaccaaagaaacaacgggaggacaaagaggggaagggtgtggctaatgggcgggtgatcactgtgggcgatcacccgcc

SEQ ID NO: 50986 - DNA, 731 bp, Oryza sativa
atatattggagtgtattgggtgcgttcgtggtaaaatctcacttcgtgattcgcgcgggtacttttgtcatttaatgccaatattggcatatgttgagaccccacgggtgcgatgtttttgaccggattgaataagatcaaaaagcatccaaacatgaattttggacatattggagtgtattgggtgcgttcgtggaaaaaactcactttgtgattcacgcggcgaacttttgtcaattaatgccaatattggcatatattgagcccccacgggtgcgatgtttttgactgtattcaaaaagttcaaaaagcatccaaacatgatttttgaacatattggagtgtattgggtgcgttcgtggtaaaaactccattcgtgattcgcgcggcgagcttttgtcaattagtgccaatattagcatatattgacccacacgggtacgatccttttcaccggaatgaaaaagttcaaaaagcaccaaaacacgatttctagacatattggagtgtattgggtgcgttcgtggaaaaaactcacttcgtgattcgcgcgacgatcttttgtcaattaatgccaatattggcatacgatgagaccccacgggtgttatgtttttgaccggaatgaaaaagttccaaaagcaccaaaacacgatttctggacatattggagtgtattgggtgcgttcgtgtcaaaaactcacttcgtgattcgccgcgggaaacttttg

SEQ ID NO: 50987 - DNA, 723 bp, Oryza sativa
attgggtgcgttcgtggaaaaaactcacttcgtgattcgcgcggcgaacttttgtcaattagtgccaatattagcatatattggcacacacgggtgtgatgtttttgaccggaatgaataagttcgaaaagcctccaaacatgagtttttgcacatattctagtgtattgggttctttcgtggcaaaaactcacttcgtgattcgggtgacgaacttttgtcaattagtgccaatattagcatatataggcccacacgggtacgatgtttttgaccggattgaaaaagttcaaaaagcaccaaaacatgatttttggacatattggagtgtactgggttcgttcgtggcaaaaacacacttcgtgattcgtgcggcgaacttttgtcaattagtgccaatattggcgtatattgagccccccacgggtgcgatgttttttgaccggaataaaaaatttcaaaaagcaccaaaacatgatttttggacttattggagtgtattgggtgcgttcgtggcaaaaactcacttcgtgattcgcgcgacgaacttttgtcaataagtgccaatatttagcatatataggcccccacgggtgcgatgtttttgaccggattgaaaaagttcaaaaataaccaaaacatgatttttggacatattgcagtgtattttgtgtgttcgcggtaaaaacttacttcgtgattcgcacgaagaacttttgtcaa

SEQ ID NO: 50988 - DNA, 1622 bp, Oryza sativa
ttgtattaaattcctatttgcaatatcagattgcttttatcttgttcttgcttgtttcttcgatttgcttgtaggaatagggttgatctgcaccggcaagatcagcaacccacggagaggtgtatcgatcgctaaggcgcaacacaacgtctcgtacggttgtagtcggatcgtcaacgtttctcccaaatcgtagttatcacaactcaccgaaagatcgggccaacaacagccttgagtgtcgagaggaactcagggttcatcacatccaaacttgatttttggatatattggagtgtattgggtgcgttcgtgttaaaaactcacttcgtgattcgcacggcgaatttttgtcaattactgtcaattttagcacaaattggcccccacgggtgcgatgtttttgaccggattgaataagttcaaaaagcatccaaacatgatttttggacatattggagtgtactgggtgcgttcgtggcaaaaactcactttgtgattcgcgcgacgaacttttgtcaataagtgccaatatttagcatatataggcccccacgggtgcgatgtttttgaccggattgaaaaagttcaaaaatcaccaaaacatgatttttggacatattgcagtgtattgggtgtgttcgcggtaaaaactcacttcgtgattcgcacgaagaacttttgtcaatttatgccaatattggcatatattgagcccccactgatgcgatgttgttgaccggaataaaaaagttcaaaaagcacccaaacatgatttttggacatattagagtgtattgggtgcattcgtggcaaaaactcacttcgtgattcgcacgaagaacttttatcaatttatgcaaatattggcatatattgagcccccacgggtgcgatgttttttgaccggaatgaaaaagttcaaaaagcacccgaacatgatttttggacatattggagtgtattgggtgcgttcgtggtaaaaactcacttcgtgattcgcgcggcgaacttttgtcaattaatgccaatattggcatatgttgagcctccagggttgcgatgttttctgacaggaataaaaaagtttaacagcaccaaaacatgatttttggacacattggagcgtattgggtgcgttcgaggcaaaaactcacttcttgaatcgcgcggcaaacttatgtcaattagtgccaatattgggtacgttcgtggcaaaaactcacttcgtgattcgtgcggcgaactttcgtcaattagtgccaatattggcacacgagggtgcgatgtttttgaccggaacgaaaaagttcaaaaaatgccaaaacatgagctttgcacatattctagtgtattgggtgcgttcgtggaaaaaactctcttcgttattcgcgcggcgaacttttgtcaattaatgccaatattggcacacgagggtgagatgtttttgaccggaatgaaaaaagttcaaaaaatgtcaaaacatgatttttgcacatattctagtgtattgggtgcgttcgtggaaaaaactctcttcgtgattcgcgcgacgaacttttgtcaattagtgccaatattaccatatataggcccacaccggtgcgatggttttggccgga

SEQ ID NO: 50989 - DNA, 1089 bp, Oryza sativa
ctcacttcgtgattcgcgcgggaaacttttgtcaatcaatgccaatattggcatatattgagcccccacgggtgcgatgtttttgaccggattcaaaaagttcaaaaagcatccaaacatgatttttggacatattggagtgtattgggtgcgttcgtggcgaaaactcacttcgtgattcgcgcggcgatcttttgtcaattaatgccaatgttggcatatattgagctcgcacgggtgcgatgtttttgactggattgaaaaagttcagaaagcatccaaacatgatttttggacatattggagtgtattgggtgcgttcgtggcaaaaacacacttcgtgattcgcgcgacgaacttttgtcaattaatgccaatattggcatatgatgagaccccacgggtgcgatgtttttgaccggaacgaaaaagttcaaaaagccccaaaacatgatttctggacatattggactgtgttgggtgcgttcgtggcaaaaactcacttcgtgattcgcgcggcgaacttttgtcaattaatgccaatattggcatatattgagcccccacgggtgcgatgtttttgatagattcataaagttcagaaagcatcgaaacatgatttttggacatattggagtgtattgggtgcgttcgtggcaaaaacttacttcgtgattcgcgcgacgaacttttgtcaattaatgccaataatggcatatgatgagaccccacgggtgcgatgtttttgaccggaatgaaaaagttcaaaaagcactaaaacatgatttctggacatattggagtgtattgggagcgttcgtggcaaaaaatcacttcgtgattcgcgcggcgaacttttgtcaattaatgccaatattagcataaattggcccacacgggtaaaatgtttttgaccggattgaaaatgttcaaaaagcatccaaacatgatttttgtacttattggagtgtattgggtgcgttcgtggcaaaaactcactccgtgattcgcacgacaaacttttgttaattaatgccaatattggcatatcttgagctcccaccggtgccatgttttttgaccggaata

SEQ ID NO: 50990 - DNA, 1982 bp, Oryza sativa
atcttgagccccccgggtgcgatgtattttcaccggaataaaaaagttcaaaaagcaccaaaacatgatttttggacatattggagtgtattgggtgcgttcgttgctaaaactcccttcgtgattcgcgcgacgaacttttgtcaattaatgccaatattggcatatgttgagcccccacgggtacgatgtttttgatcggattaaataagtttaaaaagcaccaaaacatgatttttgtacttattggagtgtattgggtgcgttcgtggcaaaaactcactccgtgattcgcacgacgaacttttgtcaattaatgccaaaattggcaaatgttgagcccccacgactgcgatgtttttgactggattcaaaaagttcaaaaagcatccatacatgatttttggacatattggagtgtattgggtgcgttcgtggcaaaaactcacttcgtgattcgcgcggcgaacttttgtcaattaataccaatattggcatatattgagcccccacgggtgcgatgtttttgactcgattcaaaaagttcaaaaagcatccaaacttaatttttggacatattggagtgtattgggtgcgttcgtggcaaaaactcacttcgtgattcgcgcggcgaacttttgtcaattaatgccaatattggcatatattgagccccacgggtgcgatgtttttgactggattcaaaaagttcaaaaagcatccaaacatgatttttgtacttattggagtgtattgggtgcgttcgtggcaaaaactcactccgtgattcgcacgacgaacttttgttaattaatgccaatattggcatatcttgagctcccacgggtgcgatgttttttgaccggaataaaaaagttcaaaaagcaccaaaacatgattttggacatattggagtgtattgggtgcgttcgttgctaaaactcccttcgtgattcgcgcgacgaacttttgtcaattaatgccaatattggcatatgttgagcccccacgggtacgatgtttttgatcggattaaataagtttaaaaagcaccaaaacatgatttttgtacttattggagtgtattgggtgcgttcgtggcaaaaactcactccgtgattcgcacgacgaaattttgtcaattaatgccaaaattggcaaatgttgagcccccacggctgcgatgtttttgactggattcaaaaagttagagaagcatccatacatgatttttggacatattggagtgtattgggtgcgttcgtggcaaaaactcacttcgtgattcgcgcggggaacttttgtcaattaatgccaatcttggcatatgatgagaccccacgggtgcgatgtttttgaccggaatgaaaaagttcaaaaagcaccaaaacatgatttcaggacatattggggtgtattgggtgcgttcgtggcaaaaactcacttcgtgattcgcgcggcgaacttttgtcaattaatgccaatattagcataaattggcccacacgggtgcgatgtttttgaccggattgaaaaagttcaaaaagcatccaaacatgatttttgtacttattggagtgtattgggtgcgttcatggcaaaaactcactccgtgattcgcacgacgaacttttgttaattaatgccaatattggcatatcttgagcccccacgggtgcgatgtattttgaccggaataaaaaagttcaaaaagcaccaaaacatgatttttggacatattggagtgtattgggtgcgttcgttgctaaaactcccttcgtgattcgcgcgacgaacttttgtcaattaatgccaatattggcatatgttgagcccccacgggtacgatgtttttgatcggattaaataagtttaaaaagcaccaaaacatgatttttgtacttattggagtgtattgggtgcgttcgtggcaaaaactcactccgtgattcgcacgacgaacttttgtcaattaatgccaa

SEQ ID NO: 50991 - DNA, 1022 bp, Oryza sativa
aaaaagttcaaaaagcatccaaacataatttttggacatattgtagtgtattgggtgtgttcgtggcaataactcatttcgtgatttgcgcgccgaactattgtcaattaatgccaatattggcatatgttgagaccccacgggtgcgatgtttttgaccggattgaataagttcaaaaagcatccaaacgtgaattttggacatattggagtgtattgggtgcgttcgtggcaaaaactcacttcgtgattcgcgcgggcaacttttgtcaattaatgccattattggcatatattgagcccccacgggtgcgatgtttttgactggattcaaaaagttcaaaaagcatccaaacaggatttttggacatattggaatgtattgggtccgttcgtggtaaaaaatcacttcatgattcacgcggcgaacttttgtcaattaatgcaaatattagcataaattggcccacacgggtgcgatgtttttgaccggattaaataagttcaaaaagcaccaaaacatgaattttggacatattggagtgtattgggtgcgttcgtggcaaaaactcactccgtgattcgcacgacgaacttttgttaattaatgccaatattggcatatcttgagcccgcacgggtgcgatgttttttgaccggaatgaaaaagttcaaaaagcaccaaaacatgatttttggacatattggagtgtattgagtgcgttcgtggcaaaaactcacttcgtgattcgcgcggcgatcttttgtcaattaatgtcaatattggcatttattgagcccccacgggtgcgatgtttttgaccggattgaaaaagttcaaaaagcatccaaacatgatttttggacatattggagtgtattgggtgagttcgtggcaaaaactcacttcgtgattcgtgcggcgaacttttgtcaattagtgcaaatattagcatatattggcccacacgagtgcgatgtttttgaccggaatgaaaaagtttaaaaagcaccaaacatga

SEQ ID NO: 50992 - DNA, 4493 bp, Oryza sativa
aaaaagttgaaaagcatcccaacttgatttttggatatattggagtgtactgggtgcgttcgtggtaaaaactcccttcgtgattcgcgcgggtacttttgtcatttaatatcaatattggcatatgttgagaccccacgggtgcgatgtttttgaccggattgaataagttcaaaaagcatccaaacatgatttttggacatattggagtgtattgggtgcgttcgtggcaaaaactcacttcgtgattcgcacggcgaacttttgtcaattaatgccaatattggcatatattgagcccccacgggtgcgatgtttttgactggattcaaaaagttcaaaaagcatccaaacataatttttggacatattggagtgtattgggtgcgttcgtggcaaaaactcacttcgtgatttgcgcgacgaactattgtcaattaatgccaatattggcatatgttgagaccccacgggtgcgatgtttttgaccggattgaataagatcaaaaagcatccaaacttgaattttggacatattggagtgtattgggtgcgttcgtggcaaaaactcacttcgtgattcgcgcggcgaacttttgtcaattaatgccaatattggcatatattgagcccccacgggtgcgatgtttttgactggattcaaaaagttcaaaaagcatccaaacataatttttggacatattgtagtgtattgggtgcgttcgtggcaaaaactcatttcgtgatttgcgcgccgaactattgtcaattaatgccaatattggcatatgttgagaccccacgggtgcgatgtttttgaccggattgaataagatcaaaaagcatccaaacttgaattttggacatattggagtgtattgggtgcgttcgtggcaaaaacgcacttcgtgattcgcgcggcgaacttttgtcaattaatgccaatattggcatatattgagcccccacgggtgcgatgtttttgactggattcaaaaagttcaaaaagcatccaaacttgatttttggatatattggagtgtactgggtgcgttcgtggtaaaaactcacttcgtgattcgcgcgggtacttttgtcatttaatatcaatattggcatatgttgagaccccacgggtgcgatgtttttgaccggattgaataagttcaaaaagcatccaaacatgaattttggacatattggagtgtattgggtgcgttcgtggcaaaaactcacttcgtgattcgcgcggcgaacttttgtcaattaatgccaatattggcatatattgagcccccgcgggagcgatgtttttgactggattcaaaaagttcaaaaagcatccaaacataatttttggacatattgtagtgtattgggtgcgttcgtggcaaaaactcatttcgtgatttgcgcgtcgaactattgtcaattaatgccaatattggcatatgttgagaccccacgggtgcgatgtttttgaccagattgaataagatcaaaaagcatccaaacttgaattttggacatattggagtgtattgggtgcgttcgtggcaaaaacgcacttcgtgattcgcgcggcgaacttttgtcaattaatgccaatattagcataaattggcccacacgggtgcgatgtttttgaccggattgaaaaagttcaaaaagcatccaaacatgatttttgtacttattggagtgtattggatgcgttcgtggcaaaaactcactccgtgattcgcacgacgaacttttgtttattaacgccaatattggcatatcttgagcccccacgggtgcgatgtattttgaccggaataaaaaagttcaaaaagcacgaaaacatgatttttggacatattggagtgtattgggtgcgttcattgctaaaactcccttcgtgattcgcgcgacgaacttttgtcaattaatgccaatattggcatatgttgagcccccacgggtacgatgtttttgatcggattaaataagtttaaaaagcaccaaaacatgatttttgaacttattggagtgtattgggtgcgttcgtggcaaaaactcgctccgtgattcgcacgacgaacttttgtcaattaatgcccatattggcatatattgagccccccacgggtgcgatgttttttgaccggaatgaaaacgttcaaaaagcacccgaacatgatttttggacatattggagtgtattgggcgtgttcgtggtaaaaactcacttcgtgattcgcgcggcgaactttcgtcaattaatgccaatattggcatatgttgagcctccagggttgtgatgttttctgacaggaataaaaaagtttaacagcaccaaagcatgatttttggacatattggagcgtattgggtgcgttcgaggcaaaaactcacttcttgaatcgcacggcgaacttatgtcaattagtgccaatattgggtacgttcgtggcaaaaactcacttcgtgattcgtgcggcgaactttcgtcaattagtgccaatattggcacacgagggtgcgatgtttttgaccggaacgaaaaagttcaaaaaatgccaaaacatgatttttgcacatattctagtgtattgggtgcgttcgtggaaaaaactgtcttcgttattcgcgcggcgaacttttgtcaattaatgccaatattggcacacgagggtgagatgtttttgaccggaatgaaaaaagttcaaaaaatgtcaaaacatgatttttgcacatattctagtgtattgggtgcgttcgtggcaaaaactcacttcgtgattcgcgcaacaaactttttttaattagtgtcaatattagcatatattggcccacacgggtgcgatgtttttgttcgtgattcgcacggcgaacttttgtcacttaatgccaatattggcaaatattgagcccccactgctgcgatgtttttgactggattgaaaaagttcaaaaagcatccaaacataatttttggacatattggagtgtattgggtgctttcgtggtaaaaactcacttcgtgattcgtgcgacgaacttttgtcgattaatgcgaatattggcatatgttgagcccccacgggtaagatatttttgaccggattgaaaaagtacaaaaagcgcaaaaacatgatttttggacatattggagtgtactgggttcgtttgtggaaaaaactcacttcgtgattcgcgcgacgtacttttgtgaattaatgccaatattggcatatattgagccccccacgggtgcgatgttttttgaccggaataaaaaagttcaaaaagcaccaaaacatgatttttgaatattttggagtgtattgggtgtgttcgttgctaaaactcccttcgtgattcgcgcgacgaacttttgtcaattaatgccaatattggcatatgttgagcccccacgggtacgatgtttttgaccggattaagtaagtttaaaaagcaccaaaacatgatttttgtacttattggagtgtattgggtgcgttcgtggcaaaaactcactccgtgattcgcacgacgaacttttgtcaattaatgccaatattggcatatattgagccccccacatgtgcgatgttttttgaccggaataaaaaagttcaaaaagcaccaaaacatgatttttggacttattggagtgtattgggtgcgttcgtggcaaaaactcacttcgtgattcgcgcggcgaacttttgtcaattaatatcaatattggcatatattgagcccccacgagtgcgatgtttttgaccggattgaaaagttcaaaaagcaccaaaacatgatttttggacttattggagtttattgggtgcgttcgtggcaaaaactcacttcgtggttcgcaccgcgaacttttgtcaattaatgccaaaattggcaaaagttgagcccccacggctgcgatgtttttggctggattgaaaaagttcaaaaagcatccaaacataatttttggacatattggagtgtattgggtgcgttcgtggcaaaaactcacttcgtgattggcgcgacgaactattgtcaattaatgccaatattggcatatgttgagcccccacgggtaagatatttttgaccggattgaaaaagtacaaaaagcgcaaaaacatgatttttggacatattggagtgtactgggttcgtttgtggaaaaaactcacttcgtgattcgcgcgacatacttttgtgaattaatgccaatattggcatatattgagccccccacgggtgcgatgttttttgaccggaataaaaaatttcaaaaagcaccaaaacatgatttttgaatattttggagtgtattgggtgtgttcgttgctaaaactcccttcgtgattcgcgcgacgaacttttgtcaattaatgccaatattggcatatgttgagcccccacgggtacgatgtttttgaccggattaagtaagtttaaaaagcaccaagacatgatttttgaacttattggag

SEQ ID NO: 50993 - DNA, 858 bp, Oryza sativa
cccccacgggtgcgatgtattttgaccggaataaaaaagttcaaaaagcacgaaaacatgatttttggacatattggagtgtattgggtgcgttcattgctaaaactcccttcgtgattcgcgcgacgaacttttgtcaattaatgccaatattggcatatgttgagcccccacgggtacgatgtttttgaccggattaagtaagtttaaaaagcaccaaaacatgatttttgtacttattggagtgtattgggtgcgttcgtggcaaaaactcactccgtgattcgcacgacgaacttttgtcaattaatgccaatattggcatatattgagccccccacaggtgcgatgttttttgaccggaataaaaaagttcaaaaagcaccaaaacatgatttttggacttattggagtgtattgggtgcgttcgtggcaaaaactcacttcgtgattcgcgcggcgaacttttgtcaattagtgccaatattggtatatattggcctacacaggtgcgctgtttttgaccggaatgaaaaagttcaaaaagcaccaaaacatgatttttggacatattggagtgtattgggtgcgttcgtggcaaaaactcacttcatgattcgcgcggcgaacttttgtcaattaatgccaaaattggcaaaagttgagcccccacggctgcgatgtttttggctggattgaaaaagttcaaaaagcatccaaacataatttttggacatattggagtgtattgggtgcgttcgtggcaaaaactcacttcgtgattggcgcgacgaactattgtcaattaatgccaatattggcatatgttgagaccccacgggtacgatgtttttgacc

SEQ ID NO: 50994 - DNA, 1471 bp, Oryza sativa
attcgcccggtgaacttttgtcaattaatgccaatattggcacacgagggtgcgatgttttgtactggaatcaaaaagttcaaaaagagccaaaacatgatttttggacatattggagtgtatctggtgcattcgtggcaaaaactcacttcgtgattcgcgcggcgaactttgtcaattaatgccaatattggcacacgagggtgcgatgttttctactggaatcaaaaagttcaaaaagagccaaaacatgatttttggacatattggagtgtattgggtgcattcgtggcaaaaactcacttcgtgattcgcgcggcgatctattgtcaattaatgccaatattggcacacgagggtgcgatgttttctactggaatcaaaaagttcaaaaagagccaaaacatgatttttggacttattggtgtgtatcgggtgtgttcgtggcaaaaacacatttcgtgattcgcgtggcttacttttgtcaaataatgtcaatattggcatatattagcccacacgggtgcgatgtttttgaccagaatgaaaatgttcaaaaaacaccaaagcatgatttttggacttattggagtgtattgggtgcgttcgtggcaaatactcaattcatgattcgcgcggcgaacttttgtcaattaatgccaatattggcacacgagggtgcgatgttttctactggaatcaaaaagttcaaaaaacgccaaaacatgatttttggacatattggagggtattgggtgcgttcgtggcaaaaacacacttcgtgattcgcgcggcgatcttttgtcaattaatgccaatattggcacacgagggtgcgatgttttctactggaatcaaaaagttcaaaaaacgccaaaacatgatttttggacatattggagtgtatcgggtgtgttcgtggcaaaaacacatttcgtgattcgcgtggctaacttttctcaaataatgtcaatattggcatatattagcccacacgggtgcgatgtttttgaccagaatgaaaaagttcaaaaacgccaaaacatgatttttggaaatattggagtgtactgggtgcattcatggcaaaaagtcacttcgtgattcgcgcggcgaacttttgtcaattaatgccaatattggcacacgagggtgcgatgctttctactggaatcaaaaagttcaaaaagagcccaaacatgatttttggacatattggagtgtatcgggtgggttcgtggcaaaaacacatttcgtgattcgcgtggcgaacttttgtcaaataatgtcaatattggtatatattggcccacacgggtgcgatgtttttgaccggaatgaaaatgttcaaaaagcaccaaagcatgatttttggacatattggagtgtattgggtgcgttcgtggcaaaaactcacttcgtgattcgcgcggcgaacttttgtcaattaatgccaatattggcacacgag

SEQ ID NO: 50995 - DNA, 1417 bp, Oryza sativa
cttttttattccggtcaaaaaacatcgcacccgtggggggctcaatatatgccaatatgggcattaattgacaaaagttcgtcgtgcgaatcacggagtgagtttttgccacgaacgcacccaatacactccaataagtaaaaaaatcatgttttggtgctttttaaacttatttaatccggtcaaaaacatcatacccgtgggggctcaacatatgccaatattggcattaattgacaaaagttcgtcgcgcgaatcacgaagggagttttagcaacgaacgcacccaatacactccaatatgtccaaaaatcatattttggtgctttttgaacttttttattctggtcaaaaaacatcgcactagtggggggctcaatatatgccaatattggcattaattcacaaaagatcgtcgcgcgaatcacgaagtgagttttttccacgaacgaacccagtacactccaatatgtccaaaaatcatgtttttgtgctttttgtactttttcaatccggtaaaaaatatcgcacccgtgggggctcaacatatgccaatattcgcattaattgacaaaagttcgtcgcacgaatcacgaagtgagtttttaccatgaaagcacccaatacactccaatatgtccaaaaattatgtttggatactttttgaactttttcaatccagtcaaaaacatcgcagccgtgggggctcaatatttgccaatattggcattaattaacaaaagttcgccgtgcgaatcacgaacaaaaacatcgcactcgtgtgggccaatatatgctaatatttgcactaattgacaaaagttcgccgcacgaatcacgaagtgagtttttgccacgaacgcacccaatacactagaatatgtgcaaaaatcatgttttgacattttttgaacttttttcattccggtcaaaaacatctcaccctcgtgtgccaatattggcattaattgacaaaagttcgccgcgtgaataacgaagagagttttttccacgaacgcacccaatacactagaatatgtgcaaaaatcatgttttggcattttttgaactttttcgttccggtcaaaaacatcgcaccctcgtgtggcaatattggcactaattgacaaaagttcgccgcacgaatcacgaagtgtgtttttgccacgaacgaacccagtacactccaatatgtccaaaaatcatgttttaatgctttttcattccggacaaaaacatcgcacccgtgtgggcctatatatgctaatattggcactaattgacaaaagttcgtcgcgcgaatcacgaagagagttttttccacgaacgcacccaatacactagaatatgtgcaaaaatcatgttttgacattttttgaacttttttcattccggtcaaaaacatctcaccctcgtg

SEQ ID NO: 50996 - DNA, 705 bp, Oryza sativa
gggctcaacatatgccaatattggcattaactgacaaaagttcgccgcgcgaattacgaagtgagtttttgccacgaacgcacccaatacactccaatatgtccaaaaatcatgttttggtgctttttgaactttttcattccgaacaaaaacatcgcacccgtgtgggccaatatatgcaaatattgacattaattgacaaaagttcgccgcgcgaatggtgccaatacactagaaaatgtgcaaaaatcatgttttggcgtttttcgatctttttcattccggtcaaaaacaacgcaccctcgtgtgccaatattggcattaattgacaaaagttcgtcgcgcgaatcacgaagtgagtttttgccacgaacgcacccaatacactgcaatatgtcagaaaatcatgtttttgtgctttttgaactttttcattccggtcaaaaacatcgcacccgtgggggctcaacatatgccaatattgacattaattcacaaaagttcgccgcgcgaaccacgaagtgagttttttccactaacggtgccaaaacactagaatatgtgcaaaaatcatgttttggcgttttttgaactttttcattccggtcaaaaacaacgaaccctcgtgtgccaatattggcactaattgacaaaagttcgccgcgcgaatcacgaagtaagtttttgccacgaacgcacccaata

SEQ ID NO: 50997 - DNA, 640 bp, Oryza sativa
gttgtttttgcccgaaatgaaaaagatcgaaaaacgccaaaccataatttttgcacattttttagtgtattggccccattcgtgaaaaaagctcattcgggattcgcgcggcgaagttttgtcaattaatgccaatattggcatataatgagcccccccgggtgcaatgttttatgtccggaatgaaaaagtttcaaaaggcaccaaaacatgatttttggacatattggagtgtattcggtgcgttcgtggcaaaaactcacttcgtgattcgggcggagaacttttgtcaattaatgccaatattggcacatattgagcccccacgggtgctatgttttatgaccggaatgaaaaagttcaaaaggcaccaaaacatgatttttggacatgttggagtgtattgggtgcgttcgtggcaaaaactcacttcgtcattccgatggagaacttttgtcaattaatgtaaatattggcatatattgagcccccacgggtgcaatgttttatgaccggaatgaaaaagttcaaaaggcaccaaaacatgatttttggacatattggagtgtattgggtgcgttcgtggcaaaaactcacttcgtgattcgcgcggcgaacttttgtcaattaatgccaatat

SEQ ID NO: 50998 - DNA, 659 bp, Oryza sativa
gcatatgttgagcccccacgggtacgatgtttttgaccggattaaataagtttaaaagcgcacaaacatgatttttgtcttattggagtgtattgggtgcgttcgtggcaaaaactcactccgtgattcgcacgacgaacttttgtcaattaatgccaatattggcatatcttgagcccccacgggtgcgatgttttttgaccggaatgaaaaagttcaaaaagcaccaaaacatgatttttggacatattggagtgtattgggtgcgttcgtggcaaaaactcactccgtgattcgcacgacgaacttttgtcaattaatgccaatattggcatatcttgagcccccacgggtgcgatgttttttgaccggaatgaaaaagttcaaaaagcaccaaaacatgatttttggacatattggagtgtattgggtgcgttcgtggcaaaaactcacttcgtgattcgcgcggcgaacttttgtcaattatgtcatattggcatatattgagcccccacgggtgcgatgtttttgaccggattgaaaaagttcaaaaagcatccaaacattatttttggacaaattggagtctattgggtgcgttcgtggcaaaaactcacttcgtgatttgcgcggcgaacttttctgaattaatgccaata

SEQ ID NO: 50999 - DNA, 1105 bp, Oryza sativa
aaagtgagtttttgccacgaacgcacccaatacattccaatatgtccaaaaatcatgttttggctctttttgaactttttgattccagtagaaaacatcgcaccctcgtgtgccaatattggcattaattgacaaaagttcgccgcgcgaatcacgaagtgagtttttgacgcacccaatacactccaatatgtccaaaaatcatgctttggtgctttttgaatattttcattacggtcaaaaacatcgcacccgagtgggccaatatatgccaatgttgacattatttgacaaaagttcgccacacgaatcacgaaatgtgtttttgccacgaacccacccgatacactccaatatgtccaaaaatcatgttttggctctttttcaactttttgattccagtagaaaacatcgcaccctcgtgtgtcaatattggcattaattgacaaaagttcgccgcgcgaatcacaaagtgagtttttgccacgaacgcacccaatacactgcaatatgttcaaaaatcatgctttgatgcgttttgaacattttcattccggtcaaaaacatcgcacccgtgtgggccaatatatgccaatattgacattatttgataaaagttcgccacgtgaatcacgaaatgtgtttttgccacgaacacacccgatacactccaatatgtccaaagatcatgttttggctctttttcaactttttgattccagtagaaaacatcgcaccctcgtgtgccaatattggcatttattgacaaaagatcgccgcgcgaatcacgaagtgagtttttgccacgaacgcacccaatacactccaatatgtcgaaaaatcatgttttggctctttttgaactttttgattccagcagaaaacatcggaccctcgtgtgccaatattggcattaattgacaaaagttcgccgcgagaatcacgaagtgagtttttgccacaaacgcacccaatacactccaatatgtccaaaaatcatgctttggagctttttgaacattttcattccggtcaaaaacatcgcaaccgtgtgggccaatatatgccaatattgacattatttgacaaaagttatccacgcgaa

SEQ ID NO: 51000 - DNA, 721 bp, Oryza sativa
aaacaaaagttcgtcgtgcgaatcacggagtgagtttttgccacgaacgcatccaatacactccaataagtacaaaaatcatgtttggatgctttttgaactttttcaatccggtcaaaaacatcgcacccgtgtgggccaatttatgctaatattggcattaattgacaaaagttcgccgcgcgaatcacgaagtgcgtttttgccacgaacgcacccaatacactccaatatgtccaaaattcaagtttggatgctttttgatcttattcaatctggtcaaaaacatcgcacccgtggggtctcaacatatgccaatattggcattaattgacaatagttcgacgcgcaaatcacgaaatgagtttttgccacgaacgcacccaatacactacaatatgtccaaaaattatgtttggatgctttttgaactttttgaatccagtcaaaaacatcgctcccgcgggggctcaatatatgccaatattggcattaattgacaaaagttcgccgcgcgaatcacgaagtgagtttttgccacgaacgcacccaatacactccaatatgtccaaaattcaagtttggatgctttttgaacttattcaatccggtcaaaaacatcgcacccgtggggtctcaacatatgccaatattggcattaattgacaatagttcgtcgcgccaatcacgaagtgagtttttgccacgaacgcacccaata

SEQ ID NO: 51001 - DNA, 922 bp, Oryza sativa
taagtttataaagcaccaaaacataatttttgtacttattggagtgtattgggtgcgttcgtggcaaaaactcactccgtgattcgcacgacgaacttttttcaattaatgccaatattggcatatcttgagcccccacgggtgcgatgttttttgaccggaatgaaaaagttcaaaaagcaccaaaacatgatttttggacatattggagtgtattgggtgcgttcgtggcaaaaactcacttcgtgattcgcgcggcgaacttttgtcaattaatatcaattttggcatatattgagcccccacgggtgcgatgtttttgaccggattgaaaaggttcaaaaagcatccaaacatgatttttggacatattggagtgtattgggtgcgttcgtggcaaacactcacttcgtgattcgtgcggcgaacctttgtcaattagtgccaatattagcatatattggcccacacgggtatgatgtttttgaccggaatgaaaaagtttaaaaagcaccaaaacatgatttttggacatattggagtgtattgggtgcgttcgttgctaaaactcccttcgtgattcgcgcgacgaacttttgtcaattaatgccaatattggcatatgttgagcccccacgggtacgatgtttttgaccggattaaataagtttaaaaagcaccaaaacatgatttttggacatattggagtgtattgggtgcgttcgtggcaaaaactcactccgtgattcgcacgacgaacttttgtcaattaatgccaatattggcatatcttgagcccccacgggtgcgatgtttttgaccggaatgaaaaagttcaaaaagcaccaaaacatgatttttggacatattggagtgtattggggtgcgttcgttggtaaaaaacccttcgtgattcgcgcga

SEQ ID NO: 51002 - DNA, 1063 bp, Oryza sativa
  unsure (1)..(1063): unsure at all n locations
catgatttttggacatattggagtgtattgggtgcgtttgtggcaaaaactcacttcgtgattctcgcggcgaacttttgtcaattaatgccaatattggcacacgagggtccgatgttttctgctggaatcaaaaagttcaaaaagcgccaaaacatgatttttggacatattggagtgtattgggtgcattcatggcaaaaactcacttcgtgattcacgcggcgaacttttgtcaattaatgccaatattggcacacgagggtgcgatgttttctactggaatcaaaaagttcagaaagagccaaaacatgacttttggacatattggagtgtatcgggtgtgttcgtggcaaaaacacatttcgtgattcgcgtggctaacttttgtcaaataatgtcaatattggcatatattggcccacacggttgcgatgtttttgaccggaatgaaaatgttcaaaaagcaccaaagcatgatttttggacatattggagtgtattgggtgcgtttgtggcaaaaactcacttcgtgattcgcgcggcgaacttttgtcaattaatgccaatattggcacacgagggtgcgatgttttctgctggaatcaaaaagttcaaaaagagccaaaacatgatttttggacatattggagtgtattgggtgcgttcgtggcaaaaactcacttcgtgattcgcgcggcgaacttttgtcaattaatgccaatattggcacacgagggtgcgatgttttctactggaatcaaaaagttcaaaaagagccaaaacatgatttttggacatattggagtgtatcgggtgtgttcgtggcaaaaacacatttcgtgattcgcgtggctaacttttgtcaattaatgccaatattggcacacgacaagggtgcgatgttttgtactgtaatcaaaaaattcataaagacccaaagcatgatctttggacatattggagtgtattgggtgcgtttgtggcanatactcacttcgtgattctcgcggcgaacttttgtcaattaatgccaatattggcacacgaaggtccgatgttt

SEQ ID NO: 51003 - DNA, 874 bp, Oryza sativa
tcctgcagccccgaatcacgaagtgagtttttacgcacccaatacactccaatatgtccaaaaatcatgctttggtgctttttgaacattttcattctggtcaaaaacatcgcacccgagtgggccaatatatgccaatgttgacattatttgataaaagttcgccacacgaatcacgaaatgtgtttttgccacgaacccacccgatacactccaatatgtccaaaaatcatgttttggctctttttcaactttttgattccagtagaaaacatcgcaccctcgtgtgtcaatattggcattaattgacaaaagttcaccgcgcgaatcacaaagtgagtttttgccacgaacgcacccaatacactgcaatatgttcaaaaatcatgctttggtgcttgttgaacattttcattccggtcaaaaacatcgcaaccgtgtgagccaatatatgccaatattgacattatttgacaaaagttagccacgcgaatcacgaaatgtgtttttgccacgaacacacccgatacactccaatatgtccaaaagtcatgttttggctctttctgaactttttgattccagcagaaaacatcgcaccctcgtgtgtcaatattggcattaattgacaaaagttcgccgcgcgaatcacaaagtgagtttttgccacgaacgcacccaatacactgcaatatgttcaaaaatcatgctttggtgctttttgaacattttcattccggtcaaaaacatcgcaaccgtgtgggccaatatatgccaatattggcattaattgacaaaagttcgccgcgcgaatcacgaagtgagtttttgccatgaatgcacccaatacactccaatatttccaaaaatcatg

SEQ ID NO: 51004 - DNA, 1081 bp, Oryza sativa
gcgaacatttgtcaattaatgccaatgttggcacacgggggtgcgatgtttttgaccagaatcaaaatgttcaaaaaaacggcaaaacaagatttttggatatattggagtgtgttgcgtgcgttcgtggcaaaaactcacttcgtgatttgcgcggcgaacttttgtcaattaatggcaacattggcacacgagggtgcgatgtttttgaccggaatcaaaaagttcaaaaacgccatttttggacattttggagtgtattgcgtgcgttcgtggcaaaaactcacttcatgattcgcacggcgaacttttctcaattaatgcgaatattggcacacgagggtgcgatgtttttgaccggaatcaaaaagttcaaaaaatgccaaaacatgatttttggacatattggagtatgttgcgtgcgttcgtggcaaaaactcacttcgtgattcgcgcggcgaacttttgtcaattaatggcaacattggcacacgggggtgcgatgtttttcaccggaataaaaaagctcaaaaaacgccaaaacatgatttttggacatattggagtgtattgggtgcgttaatggcaaaaactcaattcatgatttacacggcgaacttttatcaattaatgccaatattggcatattttggcccaaataggggcgatgtttttgaccggaatgaaaatgttcaaaaagcgctaaaacatgatttttggacatattggagtgtattgggtgcgttcatagcaaaaactcacttcgtgattcgcgcggcgaacttttgtcaattaatgccaatattggcacacgaaggagcgttgcttttgaccggaatcaaaaagttcaaaaaacgccaaaacatgatttttggacatattggagtgtattgggtgcgttcgtggcaacaactcacttcgtgattcgcgcggcgaacttttgtcaattaatgccaatgttggcacactagggtgcgatgtttttgaccggaatcaaaaagttcaaaaaacgccaaaacaagatttttggacatattggagtgtattgggtgcgttaatggcaaaaactcaattcgtgatt

SEQ ID NO: 51005 - DNA, 1069 bp, Oryza sativa
gaatcacgaagtgagtttttgccacgaacgcacccaagacactccaatatgtgcaaaaatcatgtcttggtgcattgtgaactttttcattccggtcaaaaacatcgcacccgtgtgggccaaaatataccaatattgacattatatgacaaaagttcgccgcgcgaatcacgaaatgtgttttcgccacaaacacacccgatacactccaatatgtccaaaaatcatgttttggcgttttttgaactttttgattccggtcgaaaacatcgcaccctcgtgtgccaacattggcattaattgataaaagttcgccgcgcgaatcacgaagtgagtttttgccatgtatgcacccaatacactccaatatgtccaaaaatcatgttttggcgttttttgaactttttgattccggtcaaaaacatcgcaccctcgtgtgccaatattggcattaattgacaaaagttcgccgcgcgaatcacgaagtgagtttttgccatgtatccacccgatacactccaatatgtccaaaaatcatgttttggtgtttcttgaactttttgatgcctatagaaaacatcgcaccctcgtgtgccaatattggcattaattgacaaaagatcgccgcgcgaataacgaagtgagtatttgccacgaacgcacccaatacactccaatatgtccaaaaatcatgctttggtgctttttgaatattttcattctggtcaaaaacatcgcacccgtgtggtccaaaatatgctaatgttggcattaattgacaaaagttagccacgcgaatcacgaaatgtgtttttgccacgaacacacccgatacacaccaatatgtccaaaaatcatgttttggctctttttgaactttttgattccagtagaaaacatcgcaccctcgtgtgccaatattggcattaattgacaaaagatcgccgcgcgaatcacgaagtgagtatttgccacgaacgcacccaatacactccaatatgtccaaaaatcatgctttggtgctttttgaacattttcattctggtcaaaaacatcgcacccgtgtggg

SEQ ID NO: 51006 - DNA, 1178 bp, Oryza sativa
tgggtgcgttcgtggcaaaaactcacttcgtgattcgcgcggggaacttttgtcaattaatgccaatattggcatatattgagcccccacgggtgcgatgtttttgactggattcaaaaagttcaaaaagcatccaaacaggatttttggacatattggaatgtattggttgcgttcgtggtaaaaaatcacttgatgattcacgcggcgaacttttgtcaattaatgccaatattagcataaattggcccacacgggtacgatgtttttgaacggaatgaaaaagttcaaaaagcaccaaaacattatttttggacaaaaactcacttcgcgattcgcgcggcgaacttttctgaattaatgccaatactggcacacgagggtgcgatgtttttgacaggaatgaaaaagttcaaaaagcaccaaaacatgatttttggactttttggagtgtattgggtgcgttcgtggcaaaaactcacttcgtgatttgcgcggcgaacttttgtcaattaatatcaatattggcatatattgagcccccacgggtgcgttgttttcgaccagattgaaaaagttcaaaaagcatccaaacatgatttttggacatattggagtgtattgggtgcgttcgtggcaaaaactcacttcgtgattcgtgcggcgaacttttgtcaattaatgccattattggcatatattggtacacgtgggtatgatttttttgaccggaatgaaaaagtttaaaaaccacaaaaccatgatttttagacatattggagtgtattgtgtacgtccgtgtcgaaaaatcacttcgtgactcgtgcggctgatgaaccctgagttccacatgacactcaaagctgttgttggcccgatctttcgatgagttgagataactacgatttgggagaaacgttgacgacccgactacaaccgtacaagacgttgtgttgcgccttagcgatcgatacacctctccgtaggttgttgatcttgccggtgcaaagcaaccctattcctgcaagcaaatcgaagaaacaagcaagaacaagataaaagcaatttgaattgcaactaggaatgaatgcacacaataagttggggtttcggatacaagcagatggacggtctagccgacacgcgcgctgcaaggaagtagcaatggctaaactttc

SEQ ID NO: 51007 - DNA, 777 bp, Oryza sativa
tcgcacccgtgggggctcaacatatgccaatattggcattaactgacaaaagttcgccgcgcgaattacgaagtgagtttttgccacgaacgcacccaatacactccaatatgtccaaaaatcatgttttggtgctttttgaactttttcattccgaacaaaaacatcgcacccgtgtgggccaatatatgcaaatattgacattaattgacaaaagttcgccgcgcgaatcacgaagtgagttttttccacgaatggtgccaatacactagaatatgtgcaaaaatcatgttttggcgttttttgaactttttcattccggtcaaaaacaacgaaccctcgtgtgccaatattggcactaattgacaaaagttcgccgcgcgaatcacgaagtaagtttttgccacgaacgcacccaatacactccaacatgtcaaaaaatcatgttttggtgccttttgaactttttcattccggtcataaaacatcgcacccctggggctcaacatatgccaatattggcattaactgacaaaagttcgccgcgcgaattacgaagtgagtttttgccacgaacgcacccaatacactccaatatgtccaaaaatcatgttttggtgctttttgaactttttcattccgaacaaaaacatcgcacccgtgtgggccaatatatgcaaatattgacattaattgacaaaagttcgccgcgcgaatggtgccaatacactagaaaatgtgcaaaaatcatgttttggcgtttttcgatctttttca

SEQ ID NO: 51008 - DNA, 1293 bp, Oryza sativa
aaacttgggcttgggccttgtatcattacagcccattaggggtccacaaaacctagggtttgctcccacctcctctcctggtcattcctccacctatataaactcctagcagccaccattttgcactttgggttttgttttgatgtaagtttagctgcagctacttccttgtactcgcgtgtgtcggctagaccacccggatacttgtattcagaaccccattttggtttgtttaagtttcatcatttgacaagtgccgtgagctgtttccttgtcaacttgttcttgcttgttcttcgattgcttgcaggttcaaggttgttcttggcacggcaagaacagcaacaacgtggagtcggtgtaccggttgctaaggcgcagcacccctgtggtagttgtagtcagaccgccaacgtcgtatccttccccaaatcgaagtttaccctcctctcatcgaaagatcgggaacccccgttgctgcatcatgccaatattggcattaattgacaatagatcgccgcgcgaatcacgaagtgagtttttgccacgaacacacccgatacactccaatatgtccaaaaatcatgttttggctctttttgaactttttgattccagtagaaaacatcgcaccctcgtgtgccaatattggcattaattgacaaaagttcgccgcgcgaatcacgaagtgagtttttgccacgaatgcacccgatacactccaatatgtccaaaaatcatgttttggctctttttgaactttttgattccagtacaaaacatcgcaccctcgtgtgccaatattggcattaattgacaaaagttcaccgcgcgaatcacgaagtgagtttttgccacgaacgcacccaatacactccaatatgtccaaaaatcttgttttggctctttttgagctttttgattccagtacaaaacatcgcaccctcgtatgccaatattggcattaattgacaaaagttcgccgcgcgaatcacgaagtgagtttttgccacgaacgcacccagtacactccaatatgtccaaaaatcatgctttggtgctttttgaacattttcattccggtcaaaaacatcgcacccgtgtgggccaatatgtgccaatattgacattatttgacaaaagttagccacgcgaatcacgaaatgtgtttttgccacgaacacacccgatacacaccaatatgtacaaaaatcatgttttggctctttttgaactttttgattccagtagaaaacatcgcaccctcgtgtgccaatattggcattaattgac

SEQ ID NO: 51009 - DNA, 770 bp, Oryza sativa
tttttttttttttttttttttttttttttttttttttttttttttttttttttttttttttttttttttttttttttttttttttttttttttttttttttttttttttttttttttttttttttttttttttttttttttttttttttttttttttttttttttttttttttttttttttttttttttttttttttttttttttttttttttttttttttttttttttttttttttttttttttttttttttttttttttttttttttttttttttttttttttttttttttttttttttttttttttttttttttttttttttttttttttttttttttttttttttttttttttttttttttttttttttttttttttttttttttttttttttttttttttttttttttttttttttttttttttttttttttttttttttttttttttttttttttttttttttttttttttttttttttttttttttttttttttttttttttttttttttttttttttttttttttttttttttttttttttttttttttttttttttttttttttttttttttttttttttttttttttttttttttttttttttttttttttttttttttttttttttttttttttttttttttttttttttttttttttttttttttttttttttttttttttttttttttttttttttttttttttttttttttttttttttttttttttttttttttttttttttttttttttttttt

SEQ ID NO: 51010 - DNA, 784 bp, Oryza sativa
gggggggggggggggggggggggggggggggggggggggggggggggggggggggggggggggggggggggggggggggggggggggggggggggggggggggggggggggggggggggggggggggggggggggggggggggggggggggggggggggggggggggggggggggggggggggggggggggggggggggggggggggggggggggggggggggggggggggggggggggggggggggggggggggggggggggggggggggggggggggggggggggggggggggggggggggggggggggggggggggggggggggggggggggggggggggggggggggggggggggggggggggggggggggggggggggggggggggggggggggggggggggggggggggggggggggggggggggggggggggggggggggggggggggggggggggggggggggggggggggggggggggggggggggggggggggggggggggggggggggggggggggggggggggggggggggggggggggggggggggggggggggggggggggggggggggggggggggggggggggggggggggggggggggggggggggggggggggggggggggggggggggggggggggggggggggggggggggggggggggggggggggggggggggggggggggggggggggggggggggggggggggggggggggggggggggggggggggggggggggggggggggggggggggggggggggg

SEQ ID NO: 51011 - DNA, 730 bp, Oryza sativa
aattcctgcagcccggcttcgcacgttgccactctgcccaccgtcgccccacttcgcctgcttgctctacccgccggcttcatgcggcgccgctccgcctattctgctcccctctggtcggctgctcccatgggagagagcggacagatacagagaagagaggggatgagagaggagaggatagaggaagagaggttgaaaggggaggggaagaagaggctgacgtgtggcggtgtgggacccacgtgggtagaagaaaatcgattgggattgagacagagagggggggggacctggagagacgcgcgtggtaaaggaataggttggttgtatgtacagaaagtggttggcatgctagctgtacggtggaagcaaaccattatggcttgccattgacttctttttaatttccttgagaaatagacaaaaatttaaccagatcctcctcagcaccgtagagggaaggtctcctcgccaccttgctaatgggctcgtggatctgggccgacgatggccggatccgtcatcctgcctcgtcacatggtgtcatcagggatgatggagacggcggcggtggagcgaagcagtcgtcaatgctagctacgaagaggtccatcatagataccggctacgaggtggagataaaatcagaaaaaaaaaagatgaacggattgtggatagcgcattacctggtcgtcgtagggagagaaccaccggtagcaactgcggc

SEQ ID NO: 51012 - DNA, 664 bp, Oryza sativa
aattttacacgtggtattttttggacatttcagcagatgtttcactagatcatttaggatcttgcacgtattgttctttcaatatttcaatgtatattttgtattgttttagaggtcacaaatcaatgtcccacttataataaaaatgtttcaattagtaatataattacatatgttttatttctccaaaatataatcatgtgagatctctttgtaaagatttaattgcaacaaattcaatggtgcaattgaatcacaaattggataagtatttcataagaaaaaatggtttataatttgctaattaagagtatgggagaagagacaaggggatgggagaagtttgcatgtacctcacatgtggaagagaagaaatgactgcgtgcatgcatgtggaggtttcccagaagaaaagattgcatgcatgcttagggggcccaatttttttctccaaaaatcgggcacccgttccgtagtgtcctccataaaaatcttcaatctccaaacaacatcatgtagtaccctcgatagaaaagagatgaaccatacttcaaacttaccattggtgtgaacttagcatagacacgaaacatgatgcacaaacttcaaactcgctattggaataaaatcctgaatatgctgccataaatttatgtaaccctag

SEQ ID NO: 51013 - DNA, 523 bp, Oryza sativa
ccaggctagattaattaaacattttcttatttgacttcccttttgtttaagaggtcctgttgactggttgggaagcagctaacctacgttcatcccagccgtgtgtcagatcacgtcaactactgggcctatcaattggcaggtgcaaagcgagcgaccaatagactagcaaccccgaaaatttccatgtacatgcatggatctaaacaaatgtgtttcaacatgtttttggaccccatttttcaaaagttctcatctgcactctctattgatttggctagaacaaatttatttttttctcccataagtgttcgatgataatcatgtcaactgcaaatcagtactacaaaaagacacataaaagtcagtattataggtgccggaataactaaaaccggcacctattatgcttttcccaccaccggagcgcccgcggggggcgctaaagggaaaaattggcacctttaagtatttataagtgccgattttgaaaaaagtccgacaactatactatagatgctgg

SEQ ID NO: 51014 - DNA, 1342 bp, Oryza sativa
ttatttagcacacgctgaacagcattcttgattgactgcagctgcatatttccctcaattttttctgtagtttgtgaaactatatctcttccaattttttcaaggttgatattacccatggaaacatgaacccatatcctaaagctgaatacctctgttcctgtattattgaaaacgaactgtgctaggcttgtcttcccaaaacctacaggcccaactatggatataatggaaagctcttcagcgctgttttccattaaaatgtccatgagattatctaagtctgcatccctcccaacaattgcaatgtcagtatttctgtatgatgttgtttgcttctcctcaaaattcactgctgagttgatatgtgaaaggaaatgatactgattgggcaattgttgcctttgctgtaacatctccctcttggacttcatcttataaaccatgctacctttcagaagcattggattcgatagtgagcagaataatgacccctgtaaatttaccaacatatatacataaaagtagtctttatcatgaaatatattttatattttgataacgatgttgctggaagacaaaaaaggggacagctaaacaagagttggtgcatcaaggagccaaggaaggtaccagcccttacatagctgatagatacacaagtctttggtataaaccttgcattttctcatataatacgaaggacatttttttgcatgcctacaagtttctcatctctcactatctagtccccctcaagcaaatgtacagtctaaagataagttacgtgtaagtattcggcttatctcttactattaccaaataatttcttaacaaaaggaaggatgcttctaattatcgattgtgttgacttatataagctacgctagatgacaccctgtgcgttgctgcaggatgttggtgtgtaaagtgcaattgcaaaattgcaatatatggaactgacaaaatgattaatccaacaacccaaaaaagattgatgtaggctacaaagactgggctaatccaaacagttaccatcgaaggatgtcaaagataagatgatattgcttctttcagccccataggttgcccaaagaagaataagccaaagccaaaatttgaattttaaaacttaattttgaagttgatttttaagataagatattttcaacatattttttcagcattgacttttaaatcgctgagaacacatatataaaaattttacacaaattattatttggtcgctaataaaccattacagcttataatcagcttttgggcaacctatgagaccctttctttatacagcttataaaaaagaagaaaggaaaaattccca

SEQ ID NO: 51015 - DNA, 620 bp, Oryza sativa
ataataacacctctttgtttaggcttatataaactgatttataagctaagaagtttaagcataaacaaataagcaacatttttatttagcttttttaaagccaagccactcttaccttgttaaagaaaagactatgttggagtaactagctaactataatttcagacttaacccttaaaataaaaaattgtttgcaaataaagttacaaacagtatcaaggaagtgcattttgtgacttgccatcaacgaacggttgtgaatcaccgatgaaggactctaggtcctccaattcaatggtttcaaaacataacacacaaaacgagaaaaaagcataaggaaaaccaaataaatagtacataaaatgcatataaatatgttctttgtatttcagataaatggggtatagagactttttctttaaaaatatatatttggctaatgcgcattggaccgtgcatatgtgctgcgatccaggcacgagaagagagataaaaaataattacgacaaattcattgcaaccccaaggtaaaatagtttccataaaaaaattttacaccctatcacattgaacgtttggacacatgtatggagtattaaacatagataaaaaaactaatt

SEQ ID NO: 51016 - DNA, 599 bp, Oryza sativa
aagctaagatcttggagaacccgccgcagaacctaagccaccctctagggtagagtcgttagtcgcgtgtttccttgcttgtgtgtgtagcgcgtggtttgcatcagtggggtgtgatgtaaccatgctaggttgtttgcttaatcaacttgcagaataagtaaaacaaacaacacatcaacaagaagagttagttcctttaaggtcctgtctctagttctggtctattctttcctggcttgtttcctctctcacctcaatccctgtcacagatgtttaacagagaaaaaggaaagaatgtcagcgggtatgcctcaagaaactcaagttttcaactcaatccaccactggcctcaagagagttagcaagggcacacccttggtccattccaagcatgctgcttagttcacagctaccattggttggaagtcaagaccaaaatcagtatgtgtttgatcgagcatttgccacccaggtcaatgagcttccaatgccagaagagcatgtccccttttgtcatgattgtacagagcaaggacactatgccctgaattgtccatgggtatatgccaaagaagccccttcctttggtttaaca

SEQ ID NO: 51017 - DNA, 504 bp, Oryza sativa
ttatgcttaatgtggagaagagaggagaggagatagaaaaaagtaggctatagattcattgttagttgtagtacgagttccaataaattatataagagataaatgtggggttgtattaatggtgtaatatatatatacagttaactattatatgtgggttattaagttaacttaagatgatgtgtgtaattttaaaagtgtaggatatatctttagttaactataatttgcttgggctattacgttaacttaaggcatatctcctctgcacgaaaaacggagcggtccattagcacgtgattaactaaatattagctattttttaaaaaaatagattaatttgattttttaagtaactttggtatagaaactttttgcaaaaacgtatcgtttagcaatgtgaaaaacgtacacacggaaaacgaggaattggggttgggaacaggctgtaacgaacgtagcattaagatgatgtgtgtaattttaaagttagtagttgactat

SEQ ID NO: 51018 - DNA, 777 bp, Oryza sativa
aaaattcaaatatgttttgtacgataaaaaaatattttttatctcttagtttatttcttgttaggaaagaaaaaaaggtaggattttcccttctctaattttatcggcactaataaaccgataaatcaacctaacatgtcaacgccacgtctcttctcaactgagctgcgcgttctcaccacatcacatcattatattaggtaattgagggaaaatgaaatagatacattagttttctattcatgacccatacagtagcagaaaccattagaaagatatgataatagagctaaaatgtctcatagatgaacgatacgagtatatctgtgacgacaactcgagcctgatcttgcctaccagccccttctatgttcttcagcgcgtattgaaatttcctgctgcttcattcgcatgtactctatttgtgtgttttagccttagttattttttggccatgataattcggactggcattgttggaccacatagtgaatccgtacatacttggattggcctgagaaataaatatagttagttaatgagggtaggtattgttggtagtcttaagatcacagataagtacttaaccacaccgttatagcacttccccttagagtattctaagggtatcgaacacgaggaacgatctataatcagcattcaatccaaggacaacagtctagaataaattggctagagaggattactatgtcttttaattagttaattaagttaacagtaaaagaaaaaaaagtacgaattacccccatggagtat

SEQ ID NO: 51019 - DNA, 753 bp, Oryza sativa
agcacacctcgtacacgtgtgccacataggattggaaaaaatgtttgggcatccgcagccgctgccccctacgatttcacctccgttgctgttaagcttgtcgtcgttgccgcctaggattttgcctccgtcactgtttatattcatagcttatcattgccaccagcgagtttgatggcaagtgagagagtactgagaactagaagaactcatcaaaacaattacaagtgaaatgatttggtttccctaattccgtgtatttccaagtgctagtgttgtgagaaagggaaaaaaaatacgcatgcgatttatgcacatgtccgaaagcaattttttcaatcgtaggttgcatgccatgtatacaaggtatactcatttggatagttagataagtaaatgactcacttaactcacattagtgaactaaatgtgcattttaaaagtagagtgatctacctaacacacctaaacaagttaagtgaccttccatgcattttactcttggaacaaaatggttgtcaaggcgtcgccaaagcgtcactatgacagtaaggcgctaccaggagtcagtgcgtctagcccgccttaccatattgcttatggtgtccgccttatacccaatgcgccgttatggcgtctatatcgcgtccttggcgctacaacagctaaaggtgacgccacaggaagtcgaggacacggtttttgccccgattagttcaagggcccaaaaaattggcgccatgggtcctggac

SEQ ID NO: 51020 - DNA, 733 bp, Oryza sativa
aatcataataggttacatctatcagattttatttcttgtggtttgttcacggtcctggtgagctcttactttgattttactttgttaattgttatatgattttggcttggccaattgtcatgattccggtatgttataccccatcttgtaaattatgcatttacctaactaatggtcgccacaattttttgttctgtgcgtgttatctgtaggaaaatttttgttagtagtattggctatatttaaatcatgccactgaaagattttgcagcaagggctggcccagtattcaactgaggagctttcttcaagagtttaattggttattgacccttatttagtaccttgggatattaaacaaagctgttgagcctttggaaattttacaaatggtgagcacatttgtatcacaggttttgggcagaatgcacattttcttattctgttaaaataacccactgattatatgacccagtgaaatgatctattctgccaggccagacaaaatgttaaaactctattatatgctattttttgttgcagcaatgttgcatcatggctcgtgtgatcatgtattcatgtccaagtgcctatccttttgcactatggcactacctcctccaatcactgccattgcctaggaaagacacataatgcatattatttttctactttatgcatgtaaacattaaggccaatactgacactttgggagaaccagatcgatgcattg

SEQ ID NO: 51021 - DNA, 2129 bp, Oryza sativa
tccttcttgaagcgcacccacctcccccccctcgccgccggcggccgctcgccggtggcgcggagcatgccgtggttgtccacctgcaccctcacctgctccttcctgaaccccgggagggcgatctccaccacgtcctgctcctcgccggcctgtctccactccacctccggctccacctcctcgtacactcgccgctgctccatcgccgccgccgccgctcgccggagttcgatgtgtacacgtcaactaagcttgcttttgtgacagcgacgtgttgtaataaacattatattacactttatatagatgcatgcaaatgtgttgtgagaatggaattagatagatagcttggattggttgatggagatggcaggagcatatgcaatgcaacctgggttaggttagctaagctaattaaggtagccatggatggagatggagtgagcttgacgccatgggtgacctccttccttggggcaaggacatatgcttctttgcttccaggggcggatccaacgtgaatgtaggggggactcatggataccccggagcaccccttcgattttttcaccataaatgataaactaaaggtccctaaatagctggatattgaagaaactgtgtaattgagcccccccccaattttttttttcctggatccgcccctgtttgcttccttcatggcagatttttttttttttttgctacacctggtgtattggatcttgggtaataccaaaagttcatcatagttgggccaattgggccgcctatatgcttttcaggaatttcagcctatttgttttttttaaaaaaagaaacaattttgaattggcaatacttcatttggagttcttagggagaaaaaaaatatgttagtgctgattttattatcatgtagtattagtaataagcatctgtgtaaggtgtttgtctatgtccatgtggcttggatttgggtaataccaaaatcagaattgggcctgttctgttgggcattggacttccagggacagcagcctttttattttctttttaacgaagaattttgaattgagaatgtttgttttgaaattagttcttcagatttgatatttcttttagctgcaattcctttcagggagagcagtctttctttttgttttaaagaagaatttgaaattgaccattattgtcctgaaaaaagttcttcagacttgatgttacttttagttgcaattccatttctgtttgttttaaacaataattcgaaattgacaatatttgccctcaaattagttcttcaagcttcatgtttgttttagttgcagtttgcaaaggtacttcttcactttccaagttttaaagttgtacttctttttcagcatagttcttcatgagtcttatctcttcagcctacctagcaaaacttagtaatttaggcatgtttttttttttggtgatagggaggaaaccatattgctaatccctttttcttcagttaatcttcttgtcagttctgaactgaagctcaaacagaagggcacaacgatttgtacaagaaaaccaaaaccatctgggactctgtgcttgggtagcattattcagttaagagatgatgtacacatcccatgagtcaagtgtttgcagatcaagcaaccagacaagcaaagcatacgtggagaatctgtttgcatcttggggtggatcaaattctgcataattttttaatactggtccaataccagtacaggctgctgatttgttcacacgctggtcaccccctctgaagatattgttccttggatgattgtccttgctggataaagctccttgcataatggagcacagttaacaagggggaaggacaataagtttcacaagtatcaatcagttatatgatggtaatataaggcataaaggcttttccggcacgcggaaaattagtaggaatgtctcaagaatttcagaaaaaaaaatctcattcaaggagttagggaatttcagaaaattcagagtagaagacaagatcatgtgagatcaatcaactgtacaaaagaggtccccagcttgttaggacaattccaagctgggattcaatgaatagtcctagatcagggtaccaggctacaaaaagagtaaaatgc

SEQ ID NO: 51022 - DNA, 1190 bp, Oryza sativa
cttacattgtgaaacggaggaagtacactagtacagatccttccatctgtgacggcccataacaagactggaatttgcgggccgtcacaaggaagtaatctcaatcggaccgaagtttcgcccgattgagatatggtcgcacagccatagtatatcggcataaaactaaagcccgtcacggatgacactaatctgtgacggctatagtttaggcccgattgacatgagggttccatatctcaatcgggccctaaaagaagcccgtcacagatgagggtcatctgtgacgggctccaactagaggcccgattgagataagtttagtgcccgtcacagatgacactcttttatgacggccttttattaaggctcgatagagattacttgtatgcccgtcacggttgattgttttagggtcgttacagatatttgttgcacagtataaataccccccaccacctagtgtaactgtatcccactgttcactattttggtgggaggctgtagggggcgattttttgtcctttttccaaggaaaacagaaattaaattcctgtaggtgatcaaaatggatcaatcaagtgagtaatattaatcattaattgagcaatttcatcacgtcttacttttgcaatactgatattataatatgtgcctctaatttgttttttttattttgtagcaattgatcaaagttggatgtatgccaaaaatttgaaacgtcattatatggagtacagaaagggcgtaataaattttatgaacgccgcggaggaggatcggataagaagaaacagtgattacatgtgttgtccatgtgcagattgcaagaatgagaatatgtttgatagaggagaggacgtacacggtcatctgatacaacgaggattcatggagggctatacatgttgggtgaagcatggagagcaagaatcaggaagtggagcagcagcagacagaagtggtgcgcataatcaggaagatgaagatgagcatgacatgtttataccttctccattggacggtgaaatggttgatgtggatcacgatctgctgcaagacatgttacgtgacgttgaggacccagcccagaatgagagagatggaatgaagttcagcaggttggtaagtgattccgagacgcctctgtacgctggatgcaaagcaaaacacacaaagttgtcagttac

SEQ ID NO: 51023 - DNA, 720 bp, Oryza sativa
acgaagataccttttcttttacaaagaaattcagcaagcatgaaccaaattgtgagagctagaagctccgcctgcttctccagtgcccgccataccacccgtcaccgccaccgttccaaccccgttccccgtagatggccaaggggaagagaaagagaggaggaggaggaagaagggttggatagaggatgacatgtggacccaacatgttagtgagtcccattgtagtttttgtgtgaatgacaaatgggtcccacatacttttaatttctaatgtcacaaaagtgccacgtcaatgccacgtggggcgaagaccaagtcagcaccgccacgtcagcgaaaccaccctccaagaccgtaagagagtcaaattacgtcgatttaatagtttaggggagtcgtcctacccaatttattttaaggggtataaattagatacggtttattttaagagagtcgaagtggacttttttcttgatatgatctcgtctttgccgtggaccttcatctacccacctatactcataaatcacctgggcttgcaagctactccctccgtccaaaaaaatacaaaccctggtttccgtgcccaatgtttgaccgtccgtcttatttgaaaaaattatgaaaaaaattaaaaagacaagtcacgcataaaatattaatcatgttttatcatctaacaacaatgaaaataccaattataaaaaaatttcatat

SEQ ID NO: 51024 - DNA, 545 bp, Oryza sativa
tagtttcaggagtcatcatacccaattttttttgttaacaggtacgaattagattcgggctgctaaagagagtcaaagtggaccttctcctttcctccatgccttgataagcttgtgggtcgaatcattttgtaagagatcagtctcaactgcgctgcaacccaccatgggagaacgccttgcgtgcattgcaggccgaccacagcgcgcgtgcatagatgctttcagaattttttttatttatacatttttttattaaaatattaaaatcgccctcccaaagagcgtcaagggacctaaatgcaaaatttttatttgtgttcaaactctttccaccggttttaattgcttaaaaactaataatgcttatttgatactccaaataattttgaatggaaaagtgatgaactacaaatttatagatctcatcaagatctacaacttttatataaagtttatttccatccaatatcgtttgaaatgtagatctgagattttttaaaatatgttttatattttgtaacgaatatttggatatctaaaat

SEQ ID NO: 51025 - DNA, 1019 bp, Oryza sativa
aaaaatacggttagttcttacagcttatattagtcacatatcatgcattctgtatgcatgcttggtcttccatagaggggaaataaaacatggagcgatcgcatacattttagactctctattactgtacatacatgtgcaattccaggtctatgtgccataatgcacttaaaaacagatgtaagtacattgagaatgtgcattcactttagcctccccacccccaaatcagaactactatccatacaagtgcatatgacatgtccaaacatcaataaacaggctaacagaggtacctcagtactacactgggcacaaaaagccttttcagcaggtcaatgatcgtgaccttcagaccatgcatgtgaagaactgtgtcactaattcccacttcgcagcaaaatatattaaaaaagctaaattgatactcctagcatcatcacccgtcgctgtgctcaaataaaccccaaataaactaactcaacagatcaatggacatgacccagcgaccaaaaaaccatcaatgtcaaaaacattcccttggtctttaaagacagaattcccccatagccaaccggagtatcttctacaactgtcacggccaccgccaaatccatagtagaaaaaaaaaagggccacaagtgacaccgcccaaatctcactcctagtacaatattaaccgatctaggaaggcgagcaacatgcagcagctgtggccggcggccgtggtgattgcttggaacttggaagcgaggttagaagagtaaagttggggtttttttgctccccttacctcggagcagcgaaacgcgaaggggggcgatgcggccggcgtctgctccctactgcgagctgagcctgagctgctgagctcaccaccttccttcatacacgacgtcagtgacacgaggcctaggctcaccggagagaagcggaagagaacagctgcgctctgctcgctgtggtgtccggtggttaacgcgcaccgtaggactgggtagaccggcctcattaatgct

SEQ ID NO: 51026 - DNA, 899 bp, Oryza sativa
attttgaactaaatcagccagaattttcacttcttggctatttctcaggtgttttttttttccatgtaccactaaacgattcccatgtgtaacaacaaatggctccctaatacacgattgtttacctagccaatgaagtgtctttgttttaaatgtatggcattataaatttctacatggttttcgtctccattctaacttctgctgacagacacactacggccatcgagtgttgcaatctctccaaatggcggcctgccaagttgagcacagccgcgatttgtattcttgtataagtctcgaacactttgccacacattttttgtccaatgcaatatgcgttggatccatggtacattcgtacatgtgaataataaagtatgacgcaaccaccgggctgctggcctgaagaggcattttaggggcacttggcctgcactagttgttctttgagcagtgaaacatcaaactgttcctctgccgctcatctgtcatctcattgctcgttttctctgaactgttggacccgtcacacggtcaggccccaacgaggtcaaccaccaaggtcgccagcttccgtcccttggcgccgtgcctgaccacgtcaatgtcgcctccgaccgagcactcgttgtctgtgccctcctcaccgtcggccacgcaccactcgcccggcgtgacgccatcgagcggacgccgcagcacctcctcgtctatcctctgcagcagcgcgtcgtcgtcgtcgccgaacgccccggcgaaggccgccccgctgccgaccatcgcgtcgtaccgcgacgcctgctgcccatccgcgccctgcgacgtcggcgcgccgccgtcctgcgccaccgtgtgcccgaggttgtggttgacggtgctgttccggaactgggcgg

SEQ ID NO: 51027 - DNA, 905 bp, Oryza sativa
ggtcagcgcacgggcacccccgcgcgccgccgcacgccccctgagcgcacgcgcacccggacgaggggaacccgcctaggtcggagcgaggccatgtggggcctggcggtcgtgcccacgtgcgcccccacggctgggcgcggcggggtgaggcggaggcggaggacggggtgagggagaagggggtgtagaggaagtaggcgtagggcttgccgtcgacgaggttgtcgaaggggatggggtgaggctccagcccgtgcgccgcgtcggcggcgcggccggcgctgacgctggaagcggccgcacgcagggcgcggctggcggaggccgcagcggcgaggtcttgcggcggcagccacggcaagaccagctcggccaactcgccgacggcgccgggcgttgctgagtttctcatttgagcattttggaatggaacagacggtatatccagttatctatagtttcatctgcactagaatgagctcgactcgttgattcgttgcgagttcgatgttcgggaggtaccaaattttgtgatctcgacgaaatttgaaaacaacaaattgcacctatcaaaattttgactatgccaaggtttgcccggattttggcgctaaggctgtgtttagttctatgctaaaattagaagtttgaaaaaattaaaataatgtgacagaaaagttggaagtttgtgtgtgtaagaaagttcgatgtgatgtaaaagttagaagtttgaaaaaaaaagattaaaatctaaacagggcctaacaaatgatgacaagatctatttatgcaacaagatatacatggtagtttcataaattttgacaatttgaccttttgcaaaaactatttttacaaatgaaccgccgccaaaacttatttcaaaaataaccttttgttta

SEQ ID NO: 51028 - DNA, 1425 bp, Oryza sativa
agaagatcactaacatgattagtagtttcagtttgccagtacattgaaagttctaaaaactagcatatattaccaagaccgcgaagaacctcttgcttcactttatcagcagagtcattcttataatttggcgaagtttgaagaacaagttcataaatatcaagaacagatttgacataggaggattatagattgccctgaaaaagtatacatggaacatatattcatggccagttctgtgaaaataataactgaaataagaactcacggttcttttctctaatttgtgaaaataatgccaggaataagtgacaggtccaacacatgctatttcagccagtggcactaatgaagtttttagttttgacaggaaggaggtttttcaaagataaagtatactcttcagtcccccacccccactctctcagggttatagcagaaagcacaaaaatgccatcattagtccaaacagtcaacagatgaatttttttttctcgaaaacgcaggagagctgcatttcatttcattaaggaagaaaaaaatatttataaaggagaaaggcaaaaacagcaaaacaaaagaaccccacacaaccaacagccaagtgagaactcgacaaaaacattgtgagtgcatggcgttggcctacttgggccttagagtgtgcacatgggcttgggctatttggttttcaagggaagttcaagctcatccattaaactaccaaagacacactcaatatttcaccgaaatagcttgcccttggttcgttaaaaagctagacgttcacacgggctcaagttcgggtagttttgagttccagataacctaaagcgagccaagcttgagtggcttttcaaattttttttgacagtttcacttaaaattaactataacagtcagtaacattcttagcttgtgaaaccggtaattattcataatatactgtggctgtgtgtgcattggggggtggggtgagagagagagaacctttgaacagtttgagccaacaaacgtctgcaaacaatttatagctgcaagagcgacctccttgctaccatttaggataccatttttgacaaaatcaagcaaaagcacccaacctgaaaattttaagatacaatccaactggtaatttatataatttatatccaatccgagaaaaatggataatggacagtacaatgaacacttaccagaagaaaatttgctcaattgctggaggaaagggaaaaaggaacgcaaaagtcgtgctatgccacctagtacaagaacgatagtttcatcccattgttttgtgctgtatttcgactggaaataagaaaggggggggtccatcagaacaaagtgtattccgacatgaagtaatatagtgtaatcaaaagctctactatctagtgagagtagtgtgagacccagaaataa

SEQ ID NO: 51029 - DNA, 3010 bp, Oryza sativa
ccgcgcgggggggacaaggttcttgggggatcggtcggtgccggggagggaagaggcgtgggggaatgaagcttcggtcgcggaagggagcggacggtatgggggcaggggcgcgacgagcgcgggccgcggggtgcgtggtgcgctggcggggcgggatgccgcctacgatctagcgcgaccaggaagaggacgactcggactctcaatgcgattggcgaccgcgtcacgagtatcacatgcagggagactgggacgcgtggcgtgggcgtgggcgtgggcgtgggcgtgggctcaactgctcaacaggaaggaacagcctcgactaatctgacacgtcttgttcctgagttttgacttcccttttgctactattcaaaagggacggattagtgaatcgactccagaaggcagcatgaattttactgagattttgtatgggtttctatacagatcagattagttttcgtagtgatcgacaaagtttttgttttttagaggtggccgttaaccaataaaaactaaggctgtgttcggttactggggttagaaacacatctctctacatgaaaaacatagcgattcattagcgcgtgattaattaagtattagctattattttttagaaataaattaatttgaattttttaagcaactttcgtatagtaacttttgaaaaaaggcaccgtttagcagtttgaaaagcgtgcgtgcagaaaacgagggagagggattgagaacttggagttccgaagacagcctaacctgagaactcatggaatcgtttgatgcaaacctcctaaacacactagtagcagactacaccgtgttacagtaaataaatcctttttatacagttgactactgaaacgaaatggaactgcctatatggtttttgaacaaaaacactccatacatcttaaaaatcttggactattgaattgctttgagatacatgcaacatatttaaatccatgttttctatgtcccttttttgtccactggcacaccgattttatgtaaacacaaagcctcaactgcctccccaccacgccacagtccggcctcgccggctggctagaaggtgtcaacggcaccgatgaatcccctcatcgtccgcccgtgcccaccatccaccactagcctttcgcctactgccatccctctaagccatgggaaacccccctttccccctcctcatcccacctgtactccaaccccaattatactgacacaccacaccatgttacaacttacaacgtatccatattttccgacgcaattagctaaaataaaattgtatcgtactgtcaaacaagtatcgaaagtttgtaactcaagtggcttaatgtagtcataaaagaaaaacaggtgaatattcatgcaaggatagtatgacatctccttgtgatttttttccaatgaaaagttgcataacaatagttggaacttgtttggatactatgaaatgtcatggaataaaacggccctacagcaaaagtttaagtgacttttgtttggtttgtatataatttttttaagatgatgggtataaatggcccttagtacgatggatgaaacttgaaaatagagagatggagtgaggagagagaatgggctgacatgtggagcccacagaggcaaaacaaacaattcaccactgccttccatgctggcatgcgagctggtgctccacgtcatccaaagtggcaaagaattatggacttgtctctctcctatggcaaatgtataaaggcaatcataaaaatggtatttggagagttatctttcataaaagtggcaaatagttaaatttcccaaatccacacatggatatataaatggatgtactttaaggcagccttataaccgaatattgaaaaagaataaagctaaaaaaccaagaaagaaagctactagtaaattaagcttcagatttttttttctttgatcatactctctgttactatccatcatcaacagatcaactttgaatgacgtaaaagtggtttgataaaactctggataacatggataaaacatcaaaatcctcctccacaacggaagaaataagaaagcaggaaggtgatactacagttaaaggaagagctcgatccgacttcgggtttggttgaaatttaagtgcgatggtttatttcaatttattacacattatgttgttgttttgtgaaatatatataaacatattccggagaagatagcaactagctcacgcaatgctctccgaatggcttacttaaatgaatcatatcccccatctccacacatccaagctcccacgtacaaaggagcaaagcagcggacactctagccacctgctcacatgcacggctagggagggcatgcacaaccacgcatcgtcgccgtcgcttcctcttttcagctcctccctccttctatgttgttgttacatgtgtttgaccattttgtcctataattccaactggccacatcgccactccctgcctcccttatatcaccaccaccaccaccactcttagctatcgatttggtggatttggtcaaacatccttgaggggagcacttgaacaactcacccttccgtcatccctcgatagagtttaatgagtttccgttgctctacattttcaatctatagtgcgatagtagagatttttgctcgtggatgctgggattgggtcgtgacccgtcacttacatgtggatcttaatgtatcaaagctagtaaccacatgcatcatacttgacacggtgtgtcaacttgatacctatggtgcgagacctcatacatataagtattggtttggtacccggttagtatcagatgacctctggtattggtatctataagtactaagtatgatatttaggttccatatcgatgtcatgaactatctcgttcctcaaatggtacgacgttctatatatctttcctacattggaaaataatacagaagatgtgactagggatcggtcacccgatccaaatctgcaaaaatcgggcgctg

SEQ ID NO: 51030 - DNA, 562 bp, Oryza sativa
ttggatcatgcaagatagcacaagattttttttcacatttgtttttggttttttcgtgctccaacagctacttttgagagagagtcaactatcaatgaagtgaaaagtataatgagattgctcccggaagttgaggttaggcatattggaagatggtgtaatagggtagctcatgacttagcacaattatagtacaatgcatttgtggagcatggatacccagtgttgaattcatgatgttgtaaaccttgagtgtaacaatcgggcgaatttaatataataggggtgaaaacagagaggatttgggcaatagcagtcatacctagggtgaaaatgaatcggataatatccgatccgatccgttctgaatctgtttgaaatgagaatatggtaggggtttatataaatccaacgattgtggtatcgctaaaatccagcggatgaggattatccaaagttcccattggattatccaacagcccaattcatcagataacataaactccttaattgtagactctcaccgtctcatctcatgcttgtgtagccaccaccactcata

SEQ ID NO: 51031 - DNA, 701 bp, Oryza sativa
cctttccgtttaaaattttcaactataaaattggaactttcaaattatattctaaaaccttcgatcaatcatttatttattgttttatttcaaaagtgattaagcataataagcggtatgcctggagttaattacgttaaaaaaacaaaacattgaaatgagcgtaggtcaattaattaggttgtgtaataaggtctctcggatttaaatatttttttatacgggtactcgtatttatgagtaactattttttttttggtagaccacgtaggctaacccgtggaactcacttgcatactaaaacaagccaggaacccgtcctcatccagcagtccaggtcctcggcattgtgggcttgtagccatccataagattgagatgatgaccggcagtcgcggtgtggagggagccctgcaaggctgcaagctggagcgcaatgcggcagccatgcatgaccttgagctcggaggcctcgttgcgggggtggtgaccgtgaagctggaggcctaccgtgctgatgatgggatctgccccctctcccttcgctgcaactagatccacccccatgagccccaagtttcgcatcatgcccgtcactgccgactgcatcgccctgagttccgcttctgtcgatcaacgttggtcccacaccttgagcctctgccaccaccaaaaggctgctaatggaggatatccatatg

SEQ ID NO: 51032 - DNA, 613 bp, Oryza sativa
acctatacgctagctactgtcaagttttacattgggagataatagtgtcttcataatagatgaaaaattaatatgattggtagagaagagagattatgtatttataatggcccactttaagaaatcatgggttgtggagtgtagtttctattgtgatgttttattgacatggcaccatgaacactgcttatagacactatgggttgggactgccctaataagccaagacaggcttattagggaataaaattaaatttgtaggtaaaacttttatatatgagttcgtagcaacttcaaaaccaataataaaaaagaaactacgatgaaaatatcttaaaatcaacttcagagttaagtttgaaaattcaaattttagcttttgctttgatttattagtgcaaccaatgcgctcgaatacggggcaggatgacaacgaatatgagtaggcagtcgccggcagcgaatgggaattgggtgtcctcgaagcctcgaggacaagtagggataaaaatggagtagatagtttccgtccgctccgaagaaaaagaaaacaaatacggataataatacatatatctttcgtattcgtgttcatcggatacctttcggatcg

SEQ ID NO: 51033 - DNA, 882 bp, Oryza sativa
aggtgttcaccagggccaatagcaacaaccagcggctgctccacgtcggcgacattgatagaacaagcaattaaggaaatgacactctgatttgcatctacatactctccttccatttaacgcatgaagccctaattttttttgcaaatcaaattagcgtgcaatctccaatattacataaactcaattgatgggctgcacatatcctacatttgcacattgtgctccatgtggctgcccgcacaggatagggtggagtgcgccggtgatggaggttgattgctatttttcttttgctcgtcatctctattgacatgaaccagaatgtttttgcatttttttttcgtgcttgttagatgatggatggctgctactgtgcaacgttgagctcatctctataccacaccgctacatccttccatgattccattgtcgactactgatcgccacccggttgccctctccactacccgtcataagacacaaaccatcatcttcatccttatagcaagatccagcaaagccaccagatagatttttggctgaatcatttttttttctagtttgattcacctatgagtaattttattgcttgtgtgtgattaagcctgtaatattttcattcatacgactattttgtgatacatatcaacaatactcttagtatcagtttcactcttatactgtatgttgaacacatcaatgaacatattactacacggtggctacgagatcatggctatatcgagaggaaggtggtaattgttttactcgcagaccacgaaatctcagtttttactcttatactatgtattgaatacatcagtaaacatattactacacggtggctacgagatcatgggctataacaacaggaaggta

SEQ ID NO: 51034 - DNA, 706 bp, Oryza sativa
agtagacctaaatggtgcacatgatttaagctgcgtaatttgttgccaagtcgatttactaccctataaactcaaaattttttgctatatgtttaaaaatacccgctgcaaatattttgtatttatgtttaaacttttcttttagttttttaagatagagggagtatatcagtaaatattagtatgcattcttatagtgtagatgctctaagttatacatcttttataaaaacagtattaattaataaactttagtagagaaccgtaaaaaaaaaatagtagtgcactaaatctatctaatgttactcccaccaaacaaaaacagttactcgaagaaaagattctctagcaaacgcacacaattatcagtggaatcttagtcagtacaggcaagtgtgcctgcccaattcggtgcatcaattgatgcccataatacagaggtatggcgactgtttcctgagctcaaattaagtcttcctggtcccacgaccataatatccttaactgtcctgcaacaagataacactaaacagcagtactgtttttcttctcagcatgcaactgcgatttgcaggtttgctgctagcgaacacttgcagttagcccctcctggaaacgatgttttgcagttggatccttaaaaactataggacatgtacggcgggtgtgtccacccgtaaaatactaaaatctatccaccccctgg

SEQ ID NO: 51035 - DNA, 720 bp, Oryza sativa
cttaaactgatcacatgttagtggcaatggtatcaggagggtttggttaactaccacacagtttgttgagccttatcacaaatttttggcagattttgcttcatcgatacagttctggcacgccaaaatctttaattcctcatacaaacatgccatgcacctctattactttaattatcacactttagctataactaagtttcgtatggtgtgatattaaatacgagtagatcgaccaaatatgcatcgaagcattttatatttaggaattaacgcctttgtcttctatatcctaaaacactttaatttagtttgaaaactcaaaaacaaggatttatcatttattccctcagtttcatattataagccgttttgattttttttcctaatcaataatttttaagtttatagaaaaaatatagcaacatttttaacccaaaataaacatattatcaaaatatattaaatattaatttcaataaaactaatttggtgttgtagatgttaataactttttttataaacttgatagcctgactagaaaaaagagtcgaaacgacttataatataaaatggaaagagtaattataaagtttagcctacatacttggccttatttgtttcagcttaaaattattataatccagattattgagtcagattactataagatgcattataataagttgagatagaataagctatctttagattattagt

SEQ ID NO: 51036 - DNA, 693 bp, Oryza sativa
attgtggctagccagtttagtagtggtttagttcaattggcctcccttaatccgcacgcttaagatcggaagggcgccggaaagcatcacatcaccaagctagcttgatctgctcctgcctccaagaaactgcgagagctactactgcttgacatgcagcctaagcatagcttaatcttagcttaatgatgtcaccctcacccatggtggaatgcaggaccagctagtcattgttgtttctggaacaagtggatcattacctgtattaatcactatattttttctcctttaaagaaacgactaaagcatcctctctgttttttttctttttcttgcgttgtgtgcatttgtgtgtgctaagctcacatggacaagagagattgaatcgataaatgcagtgacagaccggaagatttagtaccggttcagacatgatcagacggcctcaagaacgagcgggaattaacacttgagagtcatctgtatgatcgtattcagatgatgttctgagttagtatcagatcagatggtttaacaacaaaaacaataacagagaagatgttcgtaagaacaatggcaaacaaaagaaactcctttctgaagttcactcaggttcagagcaaacagcagttaaagaagatcggagtttacagagctggaatgtccaagagattgtagtgtaagcactcattt

SEQ ID NO: 51037 - DNA, 527 bp, Oryza sativa
cattagatggctcatgaggcagctaaccatccttggaggtccttgtgctgctacttgtttgttctattgtgtaacttttatgcaatatgcttgctaattgcttggaattcactagtcatgttggacctagccaacaccctgtcgaccgtctagtgcacagcgccttcttgaacaatgcatgtataatcatcctctttggacccagattgtgtaaagagagaaagcaaaaaagaattcaggctaaacaagttcgatggagaaaacagaagcagtgaggccattttcgaaagttgctccctgaatcagtcaaatatgttattttaacaggataagtgtccagtatcaaattactacgaaatacaaacttaaagagtgtcttctagttaataagtgaaccatgttttttgatatcttgtggcaagaccacaattttagaatttcctttagccaattttgccttaccggaaaacatcaaaggattctaactatttcagaacgcatgaagtgcatatctgcatgttattttt

SEQ ID NO: 51038 - DNA, 500 bp, Oryza sativa
ggacttgagagctagctgtgagctgcacaaccctctttctatctctctccctctctcattttctccgtttgccttgttaccgacgaggtttctctagttctctctgactctctctcattctctagctgctgtctccaatggacgagctaggcccgacggaaggtggacatggaagccaagaagacttcactcatctttcccttgttgtgctcccacagtccctctacgtctcatcgcttcctctcctgttaattgctgtcgtgagccgacaatgtcaatgatgcagcagtgagttagcgacgttgcaggtgaccacttgagcactggcggagcggctggatggtggcggcgatgatagcacaacagtggggactggtcctctctctctctctctctttttttttttgattttactaaacttttccagattcttctttgccccaagattattttcagaccatttatcttatcctatggctatgatatatactttctcccta

SEQ ID NO: 51039 - DNA, 638 bp, Oryza sativa
aacataagcgaaaggatgaagccctagctcgactcgactcattaaaactacaagttcaagtcaatatgagttacgagtttcgaggtttgatccgcccctaaatatatgtgatagtacaatctcggttgagcaatgtggatggttggatctcaatcaaatgacatagttcagccttgatcagttgattgtcaggaaaggccagcctctctacgattttttttaaaataatactatattaatggaaaatattactgtggtgcttccatatgatagagattttagtcatcaacctctatgtttacaatttttcattaaaatattattatattatttcaaaaataatcctcttaatttctccacattccacagcgatctgtctctcttttctctgcgcttatctttgtgccttgaccttgacaaccaccattgccaagcagcagaacaaatctcatactatcatattctcccatgtgtcaacacttcagtagtattaggcccaggggaccttttttaggcccaggggaccttttactatccggagatggggtagccctcccaccgctaacccttttactgtacctggggataaacctgccgaacctgacgagaaaagatggccacaacttttacccgaaaat

SEQ ID NO: 51040 - DNA, 642 bp, Oryza sativa
ttttattggttaaataaactatttacaccaactttttcatccagacctgtcttgtttcaaggaccgaaaaatcaaacaaaaaaatgaataagttactcttaatttgcaccgggtaaaaacacactgtttcactttacactaggtttagaacatactttcgttttacaccaggttgttttaaaataagtttcacctagcagtaggatacatcaccaaaaacctatagaaatttcatcaaattttataaaatacgaatggaactttgtaaatcatggtctaaattcaaaacatttcataagtttcacctgtagtttataacattttcctttaactatatgactcaatctagtaaatgtcaaacttattttgatataacatggtagaaagtgaaaatttacagtaaagccagtttgaaacaagatacattctacccagtacaaacttcaatttacttaataaaaaattcagctacacaaaaatgtcggtttgatttcactataacgttagtgtttgactatataattcagtgcgccattgtaagtaacaacgtcttatagtccgatacatttgggtggctcagctcgctatccagtttttagctacagcaaaccctgagggactcttaaactacacttctgactt

SEQ ID NO: 51041 - DNA, 536 bp, Oryza sativa
  unsure (1)..(536): unsure at all n locations
aattcgccctatagtgagtcgtattacgcgcgctcactggccgtcgttttactaagattgagcaagttacaaaatgtattgacatcaagcctaatagggagggaggaagaagaaaaaaaagtaactgatcaagccctgaaacctgatacgggaacgcccttacaaacagttgctcactctgaatggtgaatggnnnnnnnnnnnnnnnnnnnnnnnnnnnnntgagctgatgcagggactgctgagtaagatgaccgccgacagtgcatcgaatcaacattcatcttgtactcacctctccacgttcgtcctgttaaggaaaatagaataaagacacttagttaggtaaaaaaacagtaaggaattcgcatcataaaacacactgtaagaaagggatcagggacaatgaattaagtgaataagtaaagatggaaaaggaagttcgatcggatgtggtgcgaacttgaactaccgccctacataagtacggtacaaattcctttccagcactggggtctacatcgacggcccctcct

SEQ ID NO: 51042 - DNA, 1818 bp, Oryza sativa
acagcagttaagtcagaggacctgcttccctcattaacatatacttgctgatgcccacaggtgtattcggtattgagggttgagaaccctctctcagaataaacgaatcaatagattagcatataattaattaagtactaatttaaaaaaatagaattagattaatatattattttttaaaaaaatatattgtttatcagtctagaaagtgtgcacgcaaaaaataaaggagtggtggttgggaagagggagtatagaacagatactattgagcttattggctcaccagcaatctactaagctctatggaacattacacggacatttgagtgagttttttctctacgggttacaaatccctaatctaaaactggtttgtaatgtgaagcaaaatgctcccccaaacatggctataattaaagcatcaaaagtttttcaccgagggatcacggtaggcgtgcacatatataatcatatacccagtctacaaatataaaataattttctaaatataaaaggctagggaccatatcaccatactgattttgtgaccctgttttagcagttgttcaacctaaagaattttctataagtggccaaacataccgatagtccacatcgcaaagatggccatgcgtatatattacaaagacctttgcattgaatccaatgtcgtcaacacgtattcttcgaagtagagcttcaacttctaaatttaactctagtattatgtctagagtaaagttgtggagtagtctaaacccatccacttctttagtttattttgtgacagcgttccacctagttctgctcctattttagatagagctggaattatttggttggactttagcttcagaagaggtggtagagctagaactagaactatgccaaatagatcctgacccaaacaggcccttcctatccagcagcttataaaaagaaaattaatggcaccatagctgttggattactgactgcttaacgtatctagatgtagtaggcatgcacatgtagaaaaagggaaggtattttggtctggtcttatccatctgcaattttttagatgcttttctagaggaagttgttggcacaaaagatctcatcaagtcgtcatcatcatcaggctcgctagctggaccaacaagcagagcgtgggcaaaatgtggctgatatatatgtgcgctgatacgtgcagtggaaaaaaaaatctcctgctcaaggacggtctggctcggtttggagagcctgtgacataactctaattatgagaagctccagaacaattcatattatcatccagattataaaatttagaaaataagcttgaagtcaaaaggctgaaaaataaaggttttttattttcagattctcacgagctactcagagtctcagactcttaagctcactaaataatgtttcattattagatacaagccaaagatactagtcggaatattaggtagatcattttgagtgacagtctcatatgatcgggatcttattagattttaaaaatacttcacattattacgtaggatcgggacattacacaagaacttgatcgtatggatcggaatagtgaaaaaaaattaagatactaaatgagattgatattatttcggcttggtatgattgatactacaatacttgcggaaccatcattttgtttatccttatacttattcgtacaatttactagaaaaaataatttatgggtaaaatttatatatgttttcataacgacgtaaaagcaaatgttgtaaaataaaccacaatgagaaaaccacaaaatcaactttaaaaataagttttaaa

SEQ ID NO: 51043 - DNA, 3902 bp, Oryza sativa
tgcacatgcaggggagtgtgcagtactgcaggggatctcaattgcacaccaccaccatcaccacctccaccagtgtctgcttgtgtaggctgtaatatatacaggctgggaggatattaggatttgggtgagtcagtagtttgcaattctgtaggtacctctttaattttctaagcatgatatttctttcgaaggatgaaagattttgtttcaattaattaaaaaaatatttttaacaagaacttaattttgctattttaacaatccgttgcaacacacaggttttcggctagtagatataaattaaataacatggtaaatgaacttaataacaatatcttagaactagggatttgagcaatacttacataatttttttaagggagcattactcaattggctagttttcttgtgttgtaaccagccctctcgggttcaaattctagatttgatacaggtgttcgcatttacggctaattattcttacatacccgtcgataacgaggcgcccatggtgacttcgtcaatatatcggtccaatcttccggaggacttcatcaatctcaagatatgacagcccagtctttaggaggtgctcatagtggtagtgtgcgtatgtacgttcatggggtgagtgagcgcgtgtttgtactatttttctaagaaaataattttttttcaggaaacactgttttagatatgtgaaacaaataaactgatgaaatagctgaaaatagccgggccaactggccaattccaccggtgtttgccaattcttcatttggtattgcatgcacacttcaattaaaaatatttaataataaaaattatcctccatctgctgcacacggttggttcggcatggttagcacactcttgtcttgggtgtctcttgtccgtccaccgcaccgcacccaccgaaatccgtcggttatgaatcgtcgtcatccccacaccccactattgacatctggcagcaacaaaaattagttggcgtccttttctgataataacgcgtaaggcaaaaacttttcatcctatcctaccaaatatctagactcatatatagagtattaaatataaaaaaaaactaattgatatagattgcgggtaaattacgagacgaatattttaagcctaatctatctattatctattattatatactaaaagtccatgaaactttctacaaacgctctcaagccgtcgcgtggtgctcctaaaaacactcataagtcgccacgtggcgcattgataaatcctaaaaattctaaacatctaaccgttgattttcatttaattggatagacccattattttcaaccattaaatctattttataaaattaccaaatcaaccaccgatagatctatattacgagtacaaaattaccaaatcaatttatctctcttaaattatccctcggtccgtgtacctgtacagcatgtatgtttgtacgtacgtatcatcccaccatacttttttttctattttttctttcttatttagattagatgaaaaatgaaaataaataattcaagtccattcacaaccattgattttccataaaacatggtggactaattagatttttgttattataaaattgaaaggcccacgtgtgccacgtcctcccttccatcatgtaagtgcgtacttagtatatacatgtatatatcggtccctctacctattcggttccctctctctatgatgtattattagccatcaaatcgttttcacaatggttgtgtagagcctcacgcactatatatgaatcgttcccaaatgaattatctatcacataatgcaaatatattggagtatacaaacctatcaatttaccgtagccttatgtcccatataatctatttattaataaataatgagaatctataccaatcttacttgcttactgataatttttttttaaaaaaaagttgacacacagggtgtaatgatgtcactatttgtcatatcatacatttgaacttaaaataatatttgtataaaatgaaacaaaagtgtaaaatgaaccaattctagaaaaccttataatttcttagaaccattgtggttcgtaactttcccttaaattgagacaaccatgcataaccacttcatcatttttaagtgactacatatcaatagacttctctctgttctatgccatagcagaagatagttggctttgaatattatatttcttactattaaatttgggttttaacactcaggttgactaaatgtatttaaacaaatatatagatcacacatattataggaagcgaggtctagaatatatctactctatgtttttattgattcatacataagtacgtataacaaattgcatcaaatgcgaaccaattaaaagaagtaataaaacacatttattataaataacctttttgagatttttttttaaaaaataggagcccaaaacatttaaataaaaagaaaaacaacaccttactttaatttggatttaaagacctacgtcttcttaaatgatgaagatgattaactttatagatatgtgcttatatagatgaattaaatattacatattgtaaactaacaaatatcttaaaagaaacatttaagaaatgattcatgaatgtccgcgcgaatgcgcgggctaccatcttagttgttccataatttgacactgtggtgctacagtaaacaattgctaatgacggattagttaagtttaataaattcatcttgcagtttacaggcgaaatttgtaatttgttttgttattatactacatttgatacttcaaatgtgtgtccgtatatccgatgcgacacgccaaaatttttgatgccaaaacttttgatccctggaactaaggcggtgtttagatccgaggctgaaaatttttgccgtgtcacatcggatatacagacacacatttgaagtattaaacatagtctaataacaaaacgaattacagaatctgtctataaactacgagacgaatttattaagcataattaatccatcattagcaaatatttaatgtaacatcacattatcaaatcatggagcaattaagcttaaaagaattcgttctttcgcaatttacatgtaatctgtgtaattagtttttttctatatttaatacttcatacatgtatccaaacattcgatatgatagggtggaaaaacttgcgaggggaaagacttgccaagggatcaagacagaccctaaacagggcctaaactgcatggccttcttttgtgcaattgcaacaggacaatagcatactagtagtagcaacatgacattccacttttgcccctacacgaacaatgccagggacccagggcacataatctcagctacccctcgctatgctgctaccaacgataaacaatcttctaacttatcccttccacttatattataactcgttttactttttttataaaaaaaattactaaaattttcaatataaaacaaacatattatcaaaaaaatattcaatgctaaatttaataaaactaatatagtgttataaatgttgctcattttttctataaacttagtcaaacctaaataattttgactaaaaaaataaaataacttaaaatatgaaacggagggagtaacttatagcttcaataaactaacatgtgagcctgctcgtgagctcatatatcaacaacctacgtcagacgactatacattagaggagcttctccttatccaatgctattgatagacgacatggactctctactgtatgtttatctatctaagaaaatccaacaaatataattgaaaatgctttattattaaaaaatatcatcgacaaatagaactttcaggaaatgttattgtacaagtcaacttggcacataaataccaccgtcattagggggtccat

SEQ ID NO: 51044 - DNA, 1000 bp, Oryza sativa
aagatttgaagtagtgtgaatcagcacccacaaggttcattccctttatcaacttcattcaacaacttccaaaaataagttgaaaacaaatgcttttttaaaagtgcattgcaaccctacataaaatgcacgacaaacatgaacattttttacatggtccctccgtcccctaaataaaggattttgatattttatttgcattatttgaccattcatcttatttaaaatttttttggaattattatttattttttgtgacttactttattatccaaagtactttaagcacaactattcgttttttatatctgcaaaaaaaatttgaataagacgagtggtcaaacagtgcaaacaaaatattaaaatcccttatattatgaggcggatggagtacttaatagtatagccaactatcagctctaaatcatcagccaatctaatagcctatttatacaatagttaactacaaatatactccctctgtacttgtaaaggaagtcgtttatgacaatatttaagtcaaaccttgggaatataaatcatgaataactctcaagttattgagtttgaaaattaaaaattatatgaatagatttgtcttgaaaaatactttcataaaagtatacatatatcaattttcaataaatatttttatagaaacaagaagtcaaagttttttttagactgtgtcgctgtccaaaacgactttttttaggcatccacaatgtagtccaaaagtggtccataagtaatacaatatttcattcaactacctagcaacattgtggaactagttaataggaaagaaataacaaatgctacctgtaagcatatgtgctgcccatagagaatataatatattatttgtctctacttcttctctcctgctaatactatttgctatctatatacattgtgaagattacaatagttaaagtccatatatgtgagtcccatctatatgtactacttttactatatatattggggttgcccttac

SEQ ID NO: 51045 - DNA, 743 bp, Oryza sativa
ctatgtcaactttatgatggattaatctatctaggcagtacaccctcaggataagaagtagaactcctgagcagcatcatctaccggggtaatccaaaataaataagaaaaaacagtgtccgcgtagcacaccggtagttaccaatgtagaacacaaaaaaaatcaccctaaagctgaccaagagcaaagtacagtgacaaatctaggctacttcagatgctaatgatcagcatgtcctatgaccgacaagatgctaaactttcttcaggactactttcaaccacaaggttgctgttaagttagagacttaaagtaatgagtaatcacttctactatgtactatctctagtaattacttccctgtactatcttgcctacggaagatccaactcaatcattcagaagattttgattgctccaagacttcaagtactaaacagcggaaaaaaaaatcccacgtttgcatagtacatcaaacttaggagaactcccgcttttcaggggggaaatagcaactgaaatccgccaagaattcaaccaggataacctatttatcatcacacaaaggcaatcttgctaaagaaacttcaaatattggcactaattcctctgtaccctaagcatcgcttcaacgcagaactaaatcagaaatgtcaattaagaaccgtacagtccatccaaagtcagaagctctgtctcatttcattggcagagaagaaagtacacagcatgtacccaagaa

SEQ ID NO: 51046 - DNA, 574 bp, Oryza sativa
acaacattttatataaccggcccgataaccgtgtgccactcagatcacattgaacctgctacaccacatatgagggacaaattgactttaccaactttctctatttgaaagtggtaaattgtaagttaaaagtttcaaaatatgagttacaagatgttatataaccggctcgataaccaaatgccactccaagttcacatagaacctgctctactacagggagccacatctttaagttctgggcctacacaacccaaaagactaatctgatgattgaggaccgaccacaccttgtaagacgatctcccccatcatcaattaccaatgtgggactaaacccaacaatctccccattacataaattaccaccatcatctattgcccatgtgggactaaacacaacaatctatctattacatcaacctatgtgacccctaagacttgttacctggtctgtccaccatgtgacccgggttccaccttttaagtcacatcatgaacctatgtgacccctgagacttgtatactggcctctctacatgtgaaccatggaaattgttccaggaaccaaacc

SEQ ID NO: 51047 - DNA, 3600 bp, Oryza sativa
aattgggatatctagatatgactgtgttcagatgcttcttgcaaatagtgatgacggacaggaggtgcggtggagcttagcaataaaggggatcccacaaccacatatttcacgagtcacataaaggggagtgtgccggcagcggcattagcaggcggatgggggaggcgacttcagcgaatgcgacgcggcccctcccaaatccggcggagaggggagctcgggcgccgacagtggtgaaggcggcgcctcccctccccttcctctctctccctcctagatccagcagaggccgggggagctcgggcgctggcagcggcgcctctcctcccattcccctccccccccctcctagatctggcgaaggggggagctcgagcaccggcagcgacggaggcggcccctccctctctcctagatacgtgactcttcaaccacatgtacgagcaattaactttgtttgtttcttattggtacgaaatggttgtaacctatcacatcatgataaattcatcccaaattaaaaatcacttcctaaaataaatgatagaaataattaaaagtataaaagaaatctcaaacacaaaaatacacgcaagaaaaaaaaatcgaatgtcgcttggagtatctctcttaaattcttcatactctaaaatttctcaacaatttttacttaaatttttgtagcacaataactgattttagggcaacaacaactaatttcagagtttattaaaataaaaaacataaaaataatcctctccctctgtttggtccgaatctggctcgacgtccgtttccctccaattcggcccacgagtgatctcctctttcctctacccctttcccccatctccctctccttcctaggtctcctctctcccttgggccacaaccttctcagcccacctagtcctccctccttcacccctcgccgctcatgcgcccctctcccttgcttggtctaggtgaaggccgaggcctccctcctcctcacacggccatgccccggctagcccaccaagcctgtcaatcctcttctgcttgaggaaccctagcgctgccaccgattcgatctgccttcccgcttgtttccccttccaattgaatgcaaaaattgacatctcccttaggccttgttcggttagcccgggaatggctggggttgggctgcggatcacctcaatgcggactgaatcacagcccatagaaaaaaatgtgtattcgattaggaataagttcactttaggtccctaaatctatcgtcgagtttgaaattcgtccatgaactgcaaaataccagatatggcgcgtccctcaacatctaaaaccagtgcaagcgccaccgtggcgttgacaaaatcagaaaaaaatcatgggacatattagtgagtattcggtaaaaagttaagttaaaagaaaaatgcagtgggaccatgtcgtcgcccctctctctttcccctcttctttccgcattgtcatcctcggaaataactcctaaaccgatcgacgaacctggcgatgcgatgaggaggaggcggggatgtcgggcatcacttggaggaaccgggcttgtgaaaggatcacgttggccttgtcacccacggcggcggagacgcggagtggagcgagaatgaggagctcgaaggacgggagtggaggaggcgagggtcggccagcgacgacgacgcgcggtgcaggccgcggccttgggtgagggaggtgatatatatatatatatatgcgaccgcccaacgaggtaggcgcaggccggcggccgccagctggggcgggaaggaagcgaggtcacctaattccgtggcagactagctcgatcgatcggccatgcggagggcgtcattggcgaattcaaggtggggccgaggcggcagggtgaatgcgagtatgtggaagaaaaccacgcgacgcgaccggatcaggcgccgtcgccaggggtgctagctattgcggcagccgccggtaagtaggagtacgtacttcctccccctctcttctcccatgtcctagtgttagtgcttcttgacgccatttaacccacacctggcttgcctgtggcggcggccggcatcgaacccctgacagtgaatatatacagtacagcgagcggaagtgacatgcatggaggtacgtacgtagtggctgcaaaatggattagaggatagggaagcttgacctgcagttcttggtgcagttctttttggtttttcttgtgtgtgttcttggatgcaactttggggtctctgctggttggtgtgattgggtctctgagtactttttcgtatgttccattgggaattcttttaaaaaataatacgattttaatggaaaattgtaaaaatatgggtcgattaggcgaaaacgcatgttcagcactctatcgaacaaccctgattcgacgggggtgtggtagttcgacagggtagttggtccaaaaaaaaataaataaaatagtactgctacaggaatcggcaggaacatgtcgaactaacaaagttcgatagggtcgcgtgaacagtaccgcttcaggacatatcgaactttcaagctacagtgtttttccgattttttgaagttttttttatcacctatcgaactgccgcagtaccctgtcgaaccccggttgtttgacagggtgctattcttacgatttcgtctaaccgacttatatttttgtgattttccattaaaatcgtattattttcaaaaaaaattcattcattggggcagtaggaggagagggaggcaggagtagtgtttggctagccatctcctgcatgggggtggtggttacataagaagagtagggacagagtgcattgtatcagtagctactttgtgtatcagagattcagagaagctgcactagctagcttatctgaatcttctaatgcacagtaatattagtctatcacaagtactaccagtgtactaacaaagagcagcaacgaataaaatcctagtactctctcttcagttccaactgattcccatttctacccagaatatacttggctccatgccttcctaggactgcaaccaaaatgtaaaaactacaactaaaatctaatttccacatacttgtttagcatagtttgatgcatgcttcttcagagcagggaaccatcaaacagagttgcctgattaatgtaaggccatatgaatggactaattcagctgaatggtattatatgtacctaggcatatgattttccaagtgccaatagagtagcttctgcttctgatttattttttttatattaggtgagttaaagaggtgactggaggtttactttttagatttccttactttaattttactcatacaggcctgcactagctcatcttgaagctcttttgagtgagtaataatgttgggcctaagctatagtttctttctcatgtcattgttttcgtgcaactgttttttgttcatcactagattatttgaatgcctctgattgtcatcaggcgacaaaggtaggccctgaatgatcactcaacatgttgggagatagtcaatactagtaaattgtggcataacgaaaggcaatttgttagcctgcacaagttctcaaagta

SEQ ID NO: 51048 - DNA, 3220 bp, Oryza sativa
ggggagatttaaagtgcatctaggcccctaatgatgttggtgattaattacaatgcaattagagaggactaacatttttatgtaagcaaatgtgaaggttgttatgtcctcaatgagttagcgtaatgcatatcccgccgaatacgttgatgtgatgtgatgcggcaaatgagcaaatggtatgttgtacgttttcgttttcttgagttattaggaaagccgcactattaagagggatgatgcattgacttacgaggagtgatcaaagtgctgaaaatcttttttaaaaaagtgtttctcctcagtttggtgtgttctggattttttcggagttttccaaaactcattttcggactttccgaaaacacacagaaccagattttcgcttctggaaattttcggatatgtccgaaagtgattttcggactttccgaaaaagactgcgaaggaaaaagtggttctgtatattttcggacttgtccgaaactgattttcggatttttcgaaaatcattagtagagtcaatttcgcttctgtatatttttggacttgtccgaaagttattttcggacttttccgagaacatccagaacgatgttgttggtactggaaattttcggacttgtccgaaaagttttcggaatgtccgaaaaatccttcgttgactttgctgttggtgctgggctggaattttcggacatgtccgaaaatctttcggaatatctaaaaatctcaattattgtacataacgggcagaatctgggctgtggctataaatagccccctcccctcacttgtgagggctgctggttccattcgaatcatttgtgcccttggcttgctctctctctagcacttttgagccttgctttcttgtttcccctctcacccgtgttcgatttggatttggtgtgtgtgtgagagttgtggattcgagtttgtgtgagtgcttgttgttgacttcgtgaagatttgtgagcacttgcatcatctacgggagttatttgcttcatttgttactcttggaggttgaggactcctaggcggctaggtgtcgctcccgagccaccgatctacttgtggttggccgggagaagtttgtgaaggtcggatctcacctccgaaagggaagagatacccttagtggaaggaggagtgcttactgcaacctcttgaggaaagggttagctaagacccggctcttagtgagctcctcaatggagagtagaatcccctcaaggattcgaacttcgggaacaacctcgtgagcttcatctttggtgactttacttcctccctctccactagctttgcttgtttgagccgctataggtctagttgctgtttgtgctagcatattcttgttgtaggcaactagatctaggatttactttgctgtttgtgctgactccgaaaattttcggatatatccgaaaatttcggaaatatccgaaaattactgcttccgcttttagttgttttttgaattagcctattcaccccccctaggcctaattgacacttgtacatgtgtcgtcccatgtacaggtatggctaagtctgtgcccattgcggtgcgtttgtaccatcttagatattcttttgtgccaggaaattgttttaaaccctcgagggaatattgtcttattttctaaagaccatccaaatagttatgaaattcttttgaaaaaaaaataacaacagtaatgcaatgtaaatatcacttcagaaaattttaggttcaaattcaactcatatattgagatataagaaaaaggacaactttggcagatcgataatagtggtactatttatattcgaatttatctcttctttttcagtgtttaggttgaatttgaaattgaattttggtggagttctagacgtcacttactctacaagtctacattgtcaagaaaaaaaatatttttttataattatttgcattgaatttataaaaaataaaaggtgtatgagggatattcactctccattcccttttatgccttaattatttatcgtacatttctctttttacacgatttgtatataaatatgatataggttgaatttatcgatcattttcacctcatatgtattttaaagttgtgttcgtgaatatacgataagggattctgacgctaaggccacgtgatgatgacggagtgacaattggacgaatgcagcgacggtggtggaaggagtgaaggtcattacgatggtggagggatgaacaatgatggatcaaagtagtgtttagcaacgttgcaaaattatcttatctgctgggaccaccattaatgacaccttgctgccgtgccatcgcattggctgcctaattacggttgcttaatttcatccaaatcggatccatcgctcacatagcttgggatttgggaactggagttggggccaacatatggtcatatgcccatccacatacagttgcaaacatatgctctctgatttcctgcctggtacgcgtctacaagacaagcttgtgcgtgggtacacaaaaacaagatgctgcttaccattgtacggaacggaggtttatgacaggtaaacgtcgcgtgagtgagaggacatggagctaatccctgacgttaacacatttgattactactccatattacttttactgttttaaaatataaagcttttaagttttctaaggtagctttaaaataaagttttgaatatcagtagatttactccctccgttttaaaatgtttgacaccgttgactttttagtatgtgtttgaccattcgtcttattcaaaaaatctaagtaattatttattcttttcatattatttgattcattgttaaatatactttctatatacatctagttttacatatttaacaattttttttgaataagacgaacggtaaaacatgtgctaaaaagtcaacggtgtcaaatattttaaaacggagggagtattttactatgaacgtctataaatttggtatgacatgaaaagtacatttaaatatgaatgtaacaatgtcacatggcgctacacatataaattattgagtaaagtacacagccagtccttaaaattggagtaatgtgtcatttagatccatgatcttaaaaaatcaacattagggtccacgatcttgtttaaatgactcattgaggtcctggagctctgatcgggttgactggcttacgtggccatccaaagtggcagaatattccccccc

SEQ ID NO: 51049 - DNA, 4576 bp, Oryza sativa
acacaatactgccgagggcccttatttaaatggttccgtaagttgggggacccgtcgtaccaggttttgcaacgaagggacgaaaattggactggacgacaaataaagggacccaaagtgaacttattcctttttggccatgaggggggaggtctattagctatatgggctggtctcctttcacctgccccaacctggccgattggaataagttcaccgaaggtccctcaacttaacagtgagattttttgtggtcccttaaccacaaaactagaaatgtgtatctcctaaactcacataaactgtgtactcaaggtcctattgcagtattattaacgaccaaatttggtaagatatgaatcaggttcggtattggaatcaaagtggattcggcaaagagttagattcgaagaacagagtatgcatcggctgaaatggaccggacagaggacagccgatacattcgacagccgatacagccgattccgatgaagatagttgtaaaactgcttctagaatcgatcaacgtgcttcacaaggattgccacgatggagaaaagctcttagaaaggcaattgtatcatccattaattaggatattttgaatagtttttttagagatatgtttgggcaaaagtctgccgtaaagacttatgtgtatcttagagtttgttagagataagagtcgtgtccggcaaggatatatcacgtatcttgggtataaatatgacccaaatccatgtaaacagcaacacacagttcaataacactttcggtgcatcgtcacccttttactttcgttctatttcgacgagttcttgctttcgggttgagttgcatcggtttcgatcttcaactagaggtaaacttgtcactatggcttgcattctcgtgattagtgcttccatctttatgacactctaatcttgtttatgttattcgtcgagttatcatatacactttataatctttattagttgtgttatataacttgcaatcgactggttttactgtcagaaagtagccaatagagttagatctcgttattaatctagattatatcgtgtatctaccatctcttaaagattttcattatcttgtttagatcttacagttatctttatgattaatgctacatcggttgagttcgatctattaagttctatctataattgtgatatctagcctgtttcatgatcatcaatagagatagtatcagagtttcagccgatcttacctgatttagctacttttatcttataaacttgactgttatgctagatctgccctttatattaagatcttattgcattaaagtatattaggctttctgtttgatacattttgcttgttttgatatcttaatatagagtggtatcggagtattagccgatacatattatatctatctgatcaggtatgctataaacgttcatatagtcataatcttaatgtacatttagacttaagtgatttatactgtctcgacatggcgtttgatctatcccaatcacttagtttaagtatacatcgagagaaagattatatatcgttaatatctatagccgatcaagtagatttagttttatattgctttgtttctcgttgccgatctaatgccaatatcatcggcttagtgattgatgatatgtcattagctcatagccgatcggctatcgtttatggatttaacctcgttttcttgtcttttattcttgttgattgtaggatcaaatcaattggcacgctcacgaacctaaaaacaagattttggacctacacaggagttaagcagatcttccagaccagcgtgtgtttttcgcatcaacaaatatatatgggtggtttcgctgacgtggaatcctaatcagaaaaaaaattaaaaaaagtacgtggagcccatatgtcagctgcacgttctcttttcttctccttagatctcttctctcttctctcttctcttcttcaacaagaaggtgggcatggaagcatgctcgggtcccgcgaagtgaagaaggccggaccagccgcagcgccggcggcgacttcaccatcgtcgtcgtttggcttgtggagttgctcttcccgctgccgacgctcatgtcctagctccgccgacgacgcgcggctcagctgccgcttgttgctgtcccagcgctggacagcctccgcgttcgcatgcgttggcgtggcaaaaggttcgcgctggtagggcttagacgatgaagccgcctaactgccggctttcttgtgtgcgtcccacctctcaacggcgtcagctcgaccaggcttgggatcagaggccggccacacgcggaaggaggcgtggaggatgatgaggcacggcgtcgggagcaacggcaacatctggctcctcggcggggtcaagagcaatgccggcaacatgcttgtcggtgcgtcaggcgccgcagcgccgggaaaaccgctgtcaccatgaccgccctcgcccatcgccgctccgcccgctgcccgcatccgcgctcgcccatcacggctccgcccgccgccggtctccctcactgaagaagagaagagagaaaagagaagagaaggaagaaaagagaatgtgcagctgacatgtaggccctacgtacttttttttattttttttttctaactaggataccacattagtgaaaccatccatatatactgccataggaccttgagtgcacggtttgtgtgagtttagaggtacacatttctgattttgtggttaagggatcttgaaaaatctcaatgttaagttgagggacctccggtgaacttattcttggccgattagccggaagcccgggacagcccaagccaagcaggccgacctgcaacccagcagtcacatggacatggccgaagccattaacttgaggcccagctaatcggcacaaggtggctaacgttcatactacccagctatctataacgtcctctgcatttttttctctttccaaacaaaatataactcccggcctatgtacatagacatatcctgtgcacataaattttgcatgcacatcaactaacaaatattatcgaaaattgtagaaaaaaaatgtgcatatgcttttaatagtaatacaccgatatgcaaagttttagcatcaaattcattatatattagctgtaaaaatattttctgataattttaaggttataaatttgtcaaaattttatatttttccctacgcatgatgaatttaaagataaggctctcatcttttggcccaatcaacatatgccaatgccaaaatttaaatttttgaactttattttgaagttgtttttttaatcatagtttcttttaaacattgtcatttaagtcgctatgagcataactgtaacagttttaatcacaaattatattttttcactaatacgacaaatggtgtgttttccacatatagccatcaaatgaggccataagattttacgcatagatgtaatactattaataatacatgtaaaataccttctagaaatttctttgatattttgatagttggtgtgcacagtgtgtacacgtgaaaccttatgtgcataggatacgatccatacttatgaacattagtattcaaaacctagtgaatgaagtcatgcactcataagtcataactctactatcatacccaatggtgcttctccagtattcctaaaaaaaatcaagaagacgtttcgtttgatttaaattattagtggattattgccacgaattatctacttgattatagggataaattaaatattttattaaataaatttaataaatagtttatggcaagtgttccaagtaataaatcaagcgaattttttttgcataacatattttttccaaagcgttggacaaataaataattaaaaagaacatcaactaaagtggtacaatcaattgcagaatatttgaaagaattagctagcagtctagcatgtttgctgctaattgagcatcaagtcatcaaccaatagaaattgggctgcacaattatctttggattaatagaatcaacctgctcacaacaaattgcaagctctgaactatcaagagctataggtagcagtaaattgctgaactgagcatcacgactcatggtcatggggagtttcagaatagagcacagaaaatttcttggcaatctagagacagtacaaaaaggtgatcacggcctgttatgttcttccatggattgcagcaacgttatttcaaattttaggcgttcaaaatcaacaattggcacagaatgttcagaactacgttcagagctctgaacattagcacaatattttagtgttttgagcatatacacattgcgctcttacctctgaatatttgcagctattttacccactggtttgcattgacacttcagtgacatgccgttctatttcaagaagcatggctacgtgagtacgtgtgcataggaacaagcaaattgaggatatgtacactggtggagaaaccatctttcgtcggtcggccgatttccacaatagtcccggatgcaataaaaaccggggctaaagatgatctttagtcccggttcaaaaggggggctgcagg

SEQ ID NO: 51050 - DNA, 592 bp, Oryza sativa
ttttccctctctcacccaaataactgccatgtggtccagggctgcttggtgggaccttattgtcagcctcacaactttttcacacgggccacgggctgaacactcacccaacgcgcgtgagcatggacgccggcaacgtgcgctcctcctcctttcctatgccggcgacaccatatattacccgaccaccggaccatcactctctctctctctcgcccttgtctactctcaacaccctctctaacaccaccaagaacgcctcatttggtgcagccaatctctgggaacgcgaccgcatcaacttgggacgccgccgcgctttggacaccgccgcatcaccattgttcgttgccgggctaccacggttcgcgacaagctgaaccacttcgccacgagcttcatcaacctccattgatcactactacgaaaaccatttttcgtggcggccattttaggttattgctggcggaaataagagccgcacaaagcaaaggccagtgaagatcaagatcttcgctggcggttatcgaccgttagcgacaatgaattataactggcggtcgtcattagccaaccgccagcaaagatccat

SEQ ID NO: 51051 - DNA, 604 bp, Oryza sativa
cgaaggcgcgcagcacacaagcggagaggaaggcgagccgtcgcggacgaacagggagcagtcgcgcgaagcgcttcccaaaaaccttattgccgccttctctcggtgcaggacgtcgaagacagaggttccagagacctgctctcccgatcaccggtgcacgccggcgagcgggatagagtagtctacgagcgacggagcagcacagagtaggaggcaaatcctagattgatttcgcgtgtgttgcatgaaggcggcggctcggtttatatagagataggtcgctttgatcagggcgcccgcacgatctccactccgcgtaaccgaaccagataagtcgcaaacttatccggacttcacgccgttttgacgcaccagatttttcggaatgtttccaaaataaaacaaatccgaatttccggcagcaaaacaaaactgcaaaaggaggctgcatctgcgcaagggtgaggagccaattttgcggaccattcgacgtgtacgtcgtgcacgcgcgccgcttgccctgccctgccctgccaggcgtggcgagcgagcacacacgtgtgttccccctcttctctccaccacacatgcttcaagtggc

SEQ ID NO: 51052 - DNA, 1026 bp, Oryza sativa
cctgcagcccaatacatttaacggttggctttctcaagcaccaatattttgagcaaaagtctaagaaaagcattccgtagcgacaagagccgcagaaagtgaaaaactaccgtagtgaattaggagcgcaacaaattaaggggtaaactgacgacaaattaagggatctaaggtgaacttattccataccgtaggaggaacccgcggaagagatccagcccagtagagcccaacctggtacttagcagccctgaccatcatcagaagcatggggctgcaagttttccctgttataattaggagcgcaagctgcgcaacaaatgcgactgtaaattctgtgattaagtattaactagaaaatcagcatgtttgttggcgcaccgaccagttttacttttatataagtttaaggatcactgcagcatatgagttttcgtaaaattcgttaaaaaaatcattcaaacatctctatggattttaattcttcgtggaactaatcaaattacagtggggattgtctacagtgttacagctgtagtagcagccgctgacatgtgaaaccggcactgctactgcaaatacagtactgcagagcatccatatccatcaaattaggatagtaatatatggctgaggatggcctgtttaatttttacctagctgtgttcggtactcttcccaactctcctctctcgttttccgcgcgcacgtttttcaaactactaaacggtgtgtttttttgcaaaaagtttctatacgaaagttgcttaaaaaatcatattgatccatttttttaaaaaaattagctaatacttaattaatcacgcgctaatagaccgctccgtttccgtgcatgggagatgggttcccaacaccaacctccgaacacagctagagtacatttctctttacgcaatcttttattagatatttctctttaaccattctttagccaatatttttgttttcaaccagataattttacctttgttacactttggatcaccgtgactattcttaaccgta

SEQ ID NO: 51053 - DNA, 1339 bp, Oryza sativa
attcctgcagcccatctcaacttacactatagatggtaagtcatccagccgcaagtttccagcagtgatagataggggtggaaacgagcctagccaagcctagctcggctcggcttgcagtggctcgcaacaaactaggcttggcttggctcggcttggttagggaaacaagcttaaaacttgagctcggctcggctcgtttcctggctcgagccagctcgagctggcttgtaagacttcctgttaaaacacatcttcatatatattttgtaattattaaaaaaagcaagaacaaattattaacatgtaaaattaaaataaatttatggtaaatttgaagttgacaaataataacgccatataaaatgaaataatcgatataaacacaaaatggcctaggctcgcgagccaaaataagcggctcgcgagctagctcggtttggctcattttagcaacgagctgaaaaggaggcttgggcttggctcgtttggcttacaagccgagccaagccaaccaagctcgacccaagcccgagctgagctcacgagcctgagctttttttccacgactagtgatagatatttggtttggtatgtactctaacattgtaagcgactagtaatttcgttgagctctaatggtcttagcagctaattactctctacactaatatgaccagagcaggattatacttttttaatttatttctgcttttggcttaagatggaaaaactaccccctataatccgctggatcagattatctcgcgacaacgtcaattcagtaaccacaccctcctttctttctgaacacacttgctgtcgataaccatccaagacccaactttatttagcccatctcaatcagcaacacaaatgaccctgacccacgatccactcacaagccattgctcgagatttgagcttgaactcttcttggcgggacccaaacagtgcacgaatttcagacgcattgcataatcaaacccccaaaaaggaaaaagccgtcgcctttcaccaagttcgaattatttttcgcctttggagacggcacaaaaggcaagaaaacggaggaggaaaactaggccacgcattgacaggatcttctcccttgtgttcttgctgcttttctgctccatgtcctgctcttggagatggccatggctctggctctgagctgtggcaggaggcagagagggaagaaaggcggcggcggcggcggcgactgcggcggccgccatttccatgtccactaccatcttcctcgccgggtctgcgcctcctcgtttgttcccaatttgctgcctcgttttttctcgctgctgtcagcttgcgtgct

SEQ ID NO: 51054 - DNA, 1902 bp, Oryza sativa
catgacacattttctgttgtatgcagatgttggcaggtcatgggtggaactttgggacaacagaaaactttagatgctcatcctaatcctgtgttgacaatgaagaagtatttgacagtttggattgaggtattgaattgtttatagtgaggctgtttgttttgttggatgtatatatttttttgttagattgcctgattagtttttgacatgttgtggttcattggctttttctttaaaagctgagtgctattctttctcaagaaagaaagcttcaacttactgtaattgattttgaaagggaaatggaactggaaatgcttgttgacttgttgtatagtgtatactatatgctttgagaaatatgtcttctacagttgtctggatgtacagaaatctgcctgctacattaaagcctacgtatttttaacaagaaaaaataaggcattttctatcccaaactaatttactggatcacttaacccccctgaattatttaaaaaacaagaagaatttaaaaaaatgttgagatgtaagttacaatgcatataccattctacccaaaaaaaagagagagaaatagcgtcagggagtaaagtaaaatttttttagtagttgggagtgtaaaattagcaaaaacaactaatttaggggttgatgtgtctgaaatagttcctggcgagtaaaatgaactttgtttttctttttaacaagaactaggaaacctgccagatcaatattaatcgacggctgtttcgctgtaagaaaatgattattctatcttagtctaacaacataggcaacttgttctggagatgaataatttaataaccacagtaaaacttcacttatcgtttattggcatgtggtaaagtcaaaagaataaaatgagaaaaactgtagaatgcaagtatgcaacaattaatagtagcattgcatcgtatgtgtcagtagaaatattccccgaagtgattaatcctaaccctatatctgtaaagcaaattaacaacaacaatcatatctctactacttaaaataaaaaataagaggtgcttccatcatccataaaaaaaactggacgataaaaaccaaatataccaaatatgtccgtaaaaaaaaccgcgtggaaaaaaaaaggaaaaaaaccaaacctgtccaataaaaaagggcgaaaaaacgaaaaaccgggcgaaaaaaccaaatatatccgatctagaaaaaatatctgtaaaacaaattaacaacaacaattatatccctactacttaaaaaataagaggtgcttccatcgtccgtcaaaaaaactggaccgaaaaaccaaatatgtccgtaaaaaaaaccaggcggaaaaaaaaggaaaaaaaaccaaacctgtccgattaaaagggcgaaaaaacgaaaaaccgggcgaaaaaaccaaatctatcggatccagaaaaaaccgggtgaaaaaaaaacctaaacctatccgatcccaaaaaaaaaaggggtgaaagaaaagggaaaaaaaaaccggatctgtccatcaagaaaaacgaatccgactctgggtaaaaagaaggacggaaaaaaattaaaaaaaaaaagaatcaatccgattctctatctctaaacgaaaaaaatccaactctatatccgattcctccttaaaaacgaaaaataaaaggcacctctcctctaggaggattggagatctgtttgcaaaaacataacctacatgttaagagcataatatttttatatgttttaatttttgggtatgtacttttgcatttgagtccctgtaatttttatatttatatttaagtccctataatcttgcaataaggtatttgaggtcgttttttaaaaaaaataataaaagggagataacaaaggcagaaaggtgcatcaaaagaaaaa

SEQ ID NO: 51055 - DNA, 1539 bp, Oryza sativa
attttaaaggatagtataggattcaatcctttggttcaaaggcttttataggaattttttccataggattgaaatccttcaaattttctacacttttcctataaatcaaaggggaccttagtctacgtgtccaccttgttgtcggctaattgctctctattgtagctctcagtgctcatgccatggaagctgctaccggcggtcttctgcattatgctgccgctgttagtgatatgccctagaggcaatcatagagatgattgtatcacatactatgtttacatatttttccgattttgttccttgaaatagataaactcattattggttaatgaatatgtgattctttcataagactttttatgttatgtgttgctatttctaaaggatccctgatcaaatatcatatgtggaacaaatatgtttagatgatcaacacatgtattaattgatgatcatgtctcatggatcatggtatagagataccaaattaataatgtggacacatgttagtgaacatgttgttggatagacccaacatgagacactgcaagagccatatgtgttgtgtcatcagttatctcatttagtgttggtgttgaatccttagacctgagattatcatggttcccaacatgtgtagtagcttacttagggactgctaaacgctactccgtaattgggtagttataaaagtagttttcgggtatgttatgaaacatgtagtgggatatgaataatcaagatgggatttgcccatcctatagagagatatctctgggcccctcgatgttgtagattatggaaatgcatgaccatgccaaaggtgattgaggagtcaatcataagttatataatctatcaacaggttcgagtgaatgattgagctattagaggatggcacatatctagccttgagcttaatcgatatcatgaggcaaaagggttcatacaagtatacactagaggttcagccgatctgatctttatgtatgcccggtgggtcaatacgttctgctaggggccgctgttgacgcgtggaccgaaaatgagttttcgggttacagccgagtatatatgaacctacagggttgcacgcttaatgggccggaataagggaattggatagagatccaatatgagcttaatgtggataaggatccgaataggagtcctacgggccttggaggcccgagtgatggatcctatatattcgtgaggggtgtgacaggcggaggcattgcatcacgtgagaaaccctagccgtcacttccctccccgagcaaaaccctagccgcgcgcgggtgctagcacatctgtgcgtggcgttccgtccctgtacgtgtggataccagtaaaggctctgctggtttgcggtgctgatcggcataggagtacagcgaggagaacgcacgaggaggagaaggtcgagccggtgcgatcgactacttcctctacatcgacgcgcgctacttcgcgagagttccttcgacttctcagcgtcttcttccgctgcgcagtgcgtcgagtggtaacgat

SEQ ID NO: 51056 - DNA, 884 bp, Oryza sativa
ttttgagaaatcagaaatggacatgcaaaacacatggagaaatccgagggcgcctagatggaaaaaaactagcaaagttgcgtagttctctctgttttttaagacttaacgagaacaatatgaaaaaactacaactaattcgaaaggccagatacgtgtatttggcatggccatgcaatggtggggtgcaaacaaattgattaaaacaaataatctggttgtcggacaagttggagattccctcaacgttcagcgctatcacttgcaagttgcaagttggatagattgtcgctacttttgtgagggaggggctggaacggaaggatatactggggaataatgagcaaaattatattgaaattttcttttatttctaaaattcattttctttctaggggcgcttttaaaatatagttaaaaatattgaactaagttgaattaatttatttagaatgttggagtgtcataaatgtgggactgcattaataaaagagaaattctatgattttcggttgacaatcgattgattctacgaactaccttctattcctttaattttaccatgagttaacctattttagctctttactttttttataatatccaaaatattctcaagaggtttgcaagaactattgctattttactgtcaatcggaaataatgcaattaaatcaatgcgagttaaaaaagtggaattaaatctccggatgcttagtaaggttacatttgcatatactctcttcatttctttttattgacgttggttatttcatacattatgggatgggatagtattacatcttacgggcaaaatagtctattttttaggggttaacaatgtcagtcaactaacggcagtaaggaaagaaaaaaaaaactatg

SEQ ID NO: 51057 - DNA, 2280 bp, Oryza sativa
caaaggtggcttcaaaaagtatgtaccgctgctggatgatgtcgtggtcatgaagggtgtcggccacttcatcagtgaagaaaagccaaaggaagttagtgagcatgtaatcagcttcataagaaagttatcggctgaaatgtgattattcatcatgaaattcagagtgagataaaaataattgcaatgtattcttgcgtgcgaaccgtaaagtatgttagcttgcatttggaggatgtggggcgcgtaatgctcatgaattggtgcaattagtaaagtgttcgatttgtacacatcatgaagtctataattgtcatatgcaatattaattggttatgttaattgttcgaatgaatggtaatggtactatgattttttttttaaaaaaaactaacttgtggatacatggtcagaagggtttttttttaaaaaaaacggagggaatagtgatatagcgatatatttttatatgtttctaataaagtaggatcccgttgcctgctcttcaagcttcacttattaaagaagacataccttaccacaaagctcttttaggggtgaggtcctcactagcatatgacgtgagatgaatttaagacttttgtgcccaatcagatataaaccatcatttttcaaaaaaaaaaatataaaccatcatgattcggtccccacaagctaatatcacctcgaacaaatgggttttcacacataagggcagccacaaagtgaacataaaggtgggtcttaagcctctaaagtgaaccttatacattgtaagagtagtttttatagatgacatttgtttgagctagccatatgtataaagaccacccacaaggaataaaaaaatatattgctctttcctctctcatggtagtgatactctctctccctctctcaatgactaatcttgggtttgtggggtccaccttaatatccactcttacggtcttaccatatatattgtgcacatgataatatattttagtgggatccaccataatatcaatgtagtccatatacattgagcatgccctaataagttttaggtcatgttttaaatataagttttgtgaagattgttgttttaatcaccacaaaactcgttggattgtgcaaggctattctttgttccctggcatcttgtcaaccacacctcaaatatcatttagtatctttctagtatgtactcctccgggcacaaataagtggcattttaggtaacccattttaggtcaacgatgcatttgtttgattacttctattactaattactaatagagtaaattttataaagctacgggtattttaactaaactatcagaaaactacaaatttaagatggtatattatacaactatagatttaaagctaaacatgggtgaatagctaatacggtccctgaagtttcacttcgggctcagtttagttatcgatgtttcaaattgtccaaacaagttctccaaattaatcatttgggcaaatatagtcctttgacccataaaaaatgccacttgagtatgccaaatcattcttgcacgcagcggtatgaataaaatgacaattctacccttatatgccatatagaaaagaaagaaaagacaaacaaaaaaataacaagcccatcattattgcggatgggtggccgacaaaggaatttacacgatcacgattagtgcttggctacaacaatcgtaagttacaattctaaaacgatactacacgtgtgaaacatttatctttttttctttctttgctatatggtatataaggtggaatggtcatttcattcaaactgctgcatgcgaggatgacttggcatgctcacatggcattttttgggtccaagaactatattaacccaaatgattaatttgaaggacttgtttggacgatttgaaatctcaaggactaaactgagcctgaagcgaaactttggggaccatattagctattcacccgctaaacatcacaaaactagagatttagtactgaaggtagcacaaaactacatattatagagtttaaatccctaccactactagtattattttggagctataataaacattatagttttgcaattgaattggtgctaaacttgtattttgggataattttgttactaaatctgtagttttgccatacttggctctaaatttatagttttgtgataactttattgttaaatctattattttgtgatacaataccttacatatatagttttacaatagtttgatcaaagaatatatttgttttgtgaaatttactcttact

SEQ ID NO: 51058 - DNA, 765 bp, Oryza sativa
tcctgcagcccgccgtatgtagataatttctttgacatatgacaaattaaaatcatatggataaaagacttgatagtggttcaaggtatcacaaatgtcaaattattcggttcaaattaagtgaaaattagtttaaaggtgatgcaaagcgaacattgataataaagagtagcctaagtgaaattcactcttacaaattatacttgattttaatttcaacaacttatttttcgttatttttgttaatacattttttttattttcaagcaatatataggacataatagacacaggtaaactacatgcctcaatttttgatgaaacctattacattttgtatttggatgaagaccatcctagcaaaatccattgtatttgaaaaggctaaaaatcataatattccttgtttttctctctctttttacttctttaactttcatctcctcttctcttttgtatatacatttttaatctttacaaatttttttaagcttctttcatctgtaaaatgtaagtaacttatctatatcttatcacttctatattttagagtttgtctacattattttttccacccctcgtaaggtgggcagggaccaagcccgagggaagcttcacgcctgtgcttgccccgtttcggccgagcaacgtgccgtcgtgccctcgtgaaagcgccgtactcttatcctagcaaataaaaggcacactgttttttttacaaaaatttgtgtgtacataactatcttttgataaaatggacatatg

SEQ ID NO: 51059 - DNA, 1762 bp, Oryza sativa
tcctgcagcccagtattgaatcgcccacccgttacagaggtaatctcgcgaagttgaattctgaaccgttgcaaaaggatcgagagagagaaggatttgcttccgttaccgtagtaacgatgcgattaatgagtattaaatcgcccgcccgttacagaggtaatctcgcggagttgaattatgaaccattgcaaaaggatcaagagagagagagagagagagagagagagagcagagctgcagacgcagcgcgcgcctcgcccatggccttcgcccggcccgacgcgcgtgcgcgcatgtggctttccgacccccacctcaaccggtcaacagggagcctccaataactccctttttaagttgaggtactccacttttaatccccaaggtggtattattatttttaacatttatttatgggcccttgagattttaatagaaataaattgggcctagcccatttattctaacaatgtcacagtgttataatatatggataagtaatttaactataggttttgccgaaagtcatcggtttcgcctgacaccttccattacactgtagatccgcccctggttgcagtgcgcacgcgttcgttcgtctccggtgtcacgcccatcaccctgaatctcatcgtttctttgcatagtcggaaacggagaaaatgaaaccaagaagttatatccgttatccatagaactttcccaaatcagagttttatagctttgatacaactaaatcggatgcataaacaccgcaaggcaaatactagaaccgaaggtcgaaaacatatccaaaaattccctaaaagacccaatatttggtctacttgcaaaaacaagaaccagaggtagaaaaacaaatccaaaaaatccctaaaaaacttaatctttggtctacctccatccgcctgagagataccactttcgtcgctcatcactactagccaccaaatctggctcccttcatctgctgccatcaccactagttgtagagaaacctgtggaggcatggggaggggatgcggcggagagccggtggacgggaggtggaagggatgcgatggagagctggtggggtgagtgtaggggtggccggtgaggaaatgatgtcaggacggagtaggaggaggaggaggaggaggtggtggaaagagcggggcagaagaggaggcgacggcggtcggcgcgctacgcaaaggaggaggcactgattgtggagtgggggagaggtggtgggtgagatgcaggaacattcctgagactacaagtcggtctgttcgatggtggtgaagatccgcccgtcaattgcgagcagtgcgcctcgacggagactgtggatggtgaggcggagtctgagtgaggtcgccaaactcctccgctggtagctccaccgccgcatcggggtcggagtcaccctgatattgaccccctaccatgatcttcctgcagctggaagaagaacaagtgtgagaacacaaactcagagacgtgcagctaacctggcatgccaacgatcagagcaagaagctcctctaatgggaaggcaaggtaccctcccttcagagttcagccagggtgcaagttccgagctcatggccggggcacgtgaaagagtaagcggaaacaagtggtttatataggttgggggcactaagaagtgtaataccatactcctgtgttcttgcaatatgtgatgatggtcgagtttacgacagatgttggtgtgatgtgctaagtgggagaggataaaccctgttct

SEQ ID NO: 51060 - DNA, 670 bp, Oryza sativa
ttttgttgtatgacttgccaagtatttcatatactcatcttgctataatcaccattataagaggatccaatccatggaggtgaaagtttgaaggtcttaggttgctcccggtcatgttgcatgtgggattggtgctgaagctacgctaatttaattttttgctgcagttttcttttcttacgaggagtaaaaaaactctttgtaagtattatacattgtattcttccaattctgtattattggttgttgatttgtacaataccttttggataatacctaatgatgatgaaatgcataaattgttcgaaaattacttgtgaatttctctagccgtgatagctaggcccaaaatgttgcatactcaaccaattgttggcacgctatatatttgaatgcactgaataggttgaaaatcgtgtatgtatcgaatgtagactactttaaacaacaaatatagatggagggagtagcatatacaaagtgtccaaccccatatcatcttttgtgaattttgggacatggtatagagaggagggagagagaaacattgactccttgccaaacaatggcttccggtgtgtttgagaggaggagaaatgagaagattaagatgatatgtaaaagtagatgagccactaattcaaatttgaaaagtggatttatatgattt

SEQ ID NO: 51061 - DNA, 613 bp, Oryza sativa
atgaacctcctggactcagtcggcgtctcgctgatttgatagttttggcaagttcagccgaggggccctcgtgacatacctccaacaatgacaaagctgtcacccgccctttaccactggatttggttcttcggcgccaagcccattgcttgcccttcaccgccgcatggtccatcgtgaccgagcatcacttgcccttcaccgtcttggcatagtagccactttgtatcttacatcttcaatatcttcactttgtcatcattggtatctttaggtgtaatgatatcacttgagcatcaacacctttacaatccttgggatctaattatctcattcaactcaatgaaattattagtcctaatgatccggttgttaacctccacatgttgaccaaccgatcgtgtatattaaatgatatgaacaagtgatgagtattaattaataccaagtgtcatatacttaaatgtaaagatcccaattaacgaaagtgaataacatggatcaagtacattcataactaaggtataggatttgctcccctaaatatatgcatacggaatatttgtgtgaagcaagagtttgcataaatggagatgaaacattggaagcttat

SEQ ID NO: 51062 - DNA, 1212 bp, Oryza sativa
  unsure (1)..(1212): unsure at all n locations
gcttaaagaatatttggtgatgaatcaagtcacaataaaataaatgataattacataattgtttcgaataagacgaatagtctaatgttagacaaaaagttaacggcgtcatacattaaaatatggaggtagtaataaataaagagctgtctgattttannnnnnnnnnnnnnnnnnnnnnnnnnnattttattatcgccaggtgtttatcaaaatcgaagtttgattaagtttacagaaatatatagtaatattttcaacagaaaacaaatatattattaaaatatatttaatgttatatttaataaaaccaatttagtgttttagatattgataattttttacataaatttgtggtcgaactttaaaaaatattctatctttgatcactatttttttcataaaaaataaagttacacgtgcactggctagtagctatatatataggtgggtgcatccattggaatatgggtaaccatgctttcctgccgtgttttcttcctttctaccctgtgacgttcatcagcaacaagtacatgcccggatcgacttaatttgatccacttgattattttgattagtaatcgatttcccactgaccaattcttacacgtatgtctaactaggtcagacatcatagcatgtcgatattaatttatcaaattgcggagaaatattaataactttgtctcttataggaatatgtccccagcttgttgcttaactaaatgtcaatccaaataataatcatatattttgttgaaaaataattaacaatatagatcaatatctagtatcacttcacaaactttcaaacaaacaaattgaactctaaatagtacgtacgtactagtagttatttttcaaggtatatggtaatgtcaagaagtaaattagtaatgagcactctaatattttacccctcggccatatagctaaagctatttttttcttagctacaaaattaggttttcccttactttgcatacactatgagcttccttgatgcttttattgggatcgatttacatggacaccctatagtttttttttcaccacttttctttttttttcaccatatagtttttttaagcttatatacctaaaggttatacttatagggtttacacatcttttataggtcaaaagtttatataccgattcaaattggaatttaaatttaaatacatctaaagatgaacttgaatctga

SEQ ID NO: 51063 - DNA, 3050 bp, Oryza sativa
cctgcggccctatgatttactattacgcatcaactcttcataccaattttccatacccttcagtttatgcgctagattctccagtgttggttcgtcggaacttgtacctgacatcgttagcaagcaaaagaaactcacaagaaagtgtcagttcctaacaatctatatatatgtggagcttttgaaggcactcaacactcaagcatataccaaattcttataatattctcaaagaatgcaaaacaggtcaatcaccgtggctggttcgtggcacaatgacacgcttgatgagtggagcaattgcaaggccggacctgtaaaggttaggagtatgtggatcttggtaggcttaactatatcacaaggaatagcaaaaatcaaacagatttgcgaaattgaataatagtccaaagtactagtcaaaattgctggcgtagcctagactcaatcctagcttaagcaagcaaatgatcacactcggacaatccacaactcgctatagtaagcaactctctccaagattccaacaaaaaaaattccactctttctttttctgattttttttctctttttttctgttttttctttggtgcggctctttttttctttttttttctttttttttttgcaccttctgccttttctttatttcttttttttttggcaagcggtatctaccaaatggaatagctggtaaataagattacaaaggactcaagcctagaagaaaaaaaaatcaaatgaccaaagaccaaccaaccaggtgcttgtgcgtgtgaatgtgtagttacagagaaaactacgtacctcctatttgggtggtgccaggaatatggaaaccgatccttggcacatgcacttcggatagacacagaaactaactaggaaataaccaagattagtccctgatttgaggcgctatttatttggtaaccacgtaccgcgattccatgcatgcatgcactggaaagaaatctcacccaacagaaactctggattttttttctctcaaaccgatctactgctcaaccgagacgacgacgaccaaatgcaaagctcaaaactcagactgagctacgactaaaaccagcactttcgacacgacaatggaccaaaactcaagaacacaatactgaatgaaatttgaaaggctcaaactaaagtttggtgatggaaaaaaatattgcggctgtatggtagacgatgggaaaaaaattacaaaactaaaatcctcaccaagcaactgaagctctgataccaactgatgacgctctctctcgtggcccgatcttctggtgagggggataactctcgctttgatcgagtgcgacgtttgcgatgtggctaccaaccagaacaaatccaggacgccgtgcaatcgctacaccacaaacgatgtcgtaccaaccgtgacgcgcggttgatgatccctgcaatgcaaacgagagaacactgcaagaacaagataagatgcaatctaaatattgcaaatagggaattaagcacaaaggaatagttgcgattgaagtggtagatctaatcgacccggcaaatcaacacaccaactattgggggctctgaatctatagtcgccgactaatcgagcgaggactagagacaaggtgaatggcacttggcaaaattcaactaaacaaaacccaattgtttttgaggatatacaaagttatttatagaggaaaataaagctagggttaagtgctaatttgtggaggtggagggagacacttccgggatgggcctagtctattacaaggcccaaggcccaagttcggtttcagcaacagcactgtcttattttggtgattcccgttgactcgagatgaatttggacatgaaaccggatgcgtttgaaaggtagcgagataagatttccacgaagtccaagatcacccaaatcggagatagcatgaaggcgctaggtccgtttgaagtcagtgctgtctccggaggccgaactggtcttggacttgaaattattattggagcgtgtgaagttacgagcgtatccgacgaagtgatgtcctcatcaacaggtggtgtttacatactacacctccgattttaataaaagagtagaatattactgctactttgatcactcaattacttaactctggtaaagaaaacgtaacctattttcggcagcatttatttgaatcgatcaactgtactaccaagggcctataaaaattaaggatttgcatggggtacgaatttcatgaccccgcgtacaagttaattttcacatacggctctttcgagaaatcatccatcaaaataagttctagttgcccaaaaaaatattttgtattttaataggcatagagtattgttctttgggaagcgctaaaagtttccagcatctgacacatcctttcctagctgatcgactccatcccactcctgtttttacacattttggcgaggcgtatataaatcggacacccgtttttttaaaaaaatcggggttgttccaccaaatagatcggaattgtttcactacgttgattgaaaatggtccaatcgtttaaaaagcttaaatacaaccaaatcacctcataaaacattttgctacagcgcatgaaacaacggtttttgaagctatttcaccgcatataaaaataatgtttcagcaaatagcgaaaggatgtttcaattctctgcaacatttgatctatacatagtgtaacaatacgaatatacttgttgaaacattattggtgaaaaaaaaatgaaacggattcctgttaatagagtgtttccgtaatatgtggcagatttattgcaacagtgcgtgtggtggggcgcgtggtggacggaggcgcggtgccccatttttttcggcgcggaggcgcgggcacccgatttgaagaattttcagacattctgggtaagagaatttggtctgtagtaacaagttttgccacgcatattatccactttcccatgagtgctttgttcatgactttctggtcttatcacctcttcagctcttctcccatttctttctcttaataattagggaccaa

SEQ ID NO: 51064 - DNA, 885 bp, Oryza sativa
gtaccccgtgtactcgggccacgagaagccaaggaaacgggagaggtcacgaagctgagcgacgtggtgaccctcaccaaaaccgtgggaactgaagctggcgttcactgccatctacaattttgaaagagggagaaagatcagtaaccgttttagaaacaaactattgaaaataaagaaaaccaaagaaaccttagcttttcgcaagtagttttgaacttagtatccttagggtcgtcctaagcgtcgggtttcgccctagggccaagcctgtgctctgataccatctcttgtcacgccccgaactagtcccgaccgggactagcccgtgacgctccaaattaacctgttaatcgataccagtcccaggaaacagtgctggtatcacagggagacagagtatcacagcaacagaggtctctttattatagagtagaagtacagtcatgttgggctgcggacagatcccgagctcacaactgcattacaaaaggaaagcggaagccaggacttggaccaatcatcacaggcgcgacttgggaactaggccgaaaccctaaaactcatcgtagccgacttgctcctggaagaactccttgtcagcaggatccacttcatcttcttcagcaactgggggggattatttatatagagcaagggtgagtacgggagtactcagcaagccaggggaaataagtgtttgatgcaggcttcaaggaaaggctgttgttttcgtaattgattttgtttgaactcttttctaaaaagtctaagtgagtgcttctcaaacgacacggatgagacagtgcgtctcgtccggtcggagtatgtgcaatgtgtcagtctttaggattgcaacaaggttggcacccggccaacaacttt

SEQ ID NO: 51065 - DNA, 667 bp, Oryza sativa
  unsure (1)..(667): unsure at all n locations
ctgcagccctatatgcgcatatatgtacgaactactatgtatgttcgtatgtatatatgtacgcacatcgatctgcatgcgtatgcatgatcagtgtgttggatgcaataagtacgtcatgatgcagacgtattgagtatctacaaatacagatatatatgtatccggtgtgtatttttattacaaattactccctccgtattttaatgtatgacgccattgatttttcaaccaacgtttgactattcgttttattcaaaatttttatccaaatataaaatatttatgccatgcttaaagaatatttggtgatgaatcaagtcacaataaaataaatgataattacataattgtttcgaataagacgaatagtctaatgttagacaaaaagttaacggcgtcatacattaaaatatggaggtagtaataaataaagagctgtctgattttannnnnnnnnnnnnnnnnnnnnnnnnnnattttattatcgccaggtgtttatcaaaatcgaagtttgattaagtttacagaaatatatagtaatattttcaacagaaaacaaatatattattaaaatatatttaatgttatatttaataaaaccaatttagtgttttagatattgataattttttacataaatttggggtcgaactttaaaaaatat

SEQ ID NO: 51066 - DNA, 1636 bp, Oryza sativa
ctatgtatctggacacacagttgtccagattcatagctaaaattgcttatattttgggacggagggagtagatttttaaatgtttagtaaaaaaaggaaaaaaaatctagaatctcctgccaaaaaaggaaatcttaccttagttaatactccttctgtcctattttaagtgcaactatagttttcgtatccaacgtttgaccatccgtcttatttaaaaaactttaaaaaaagttttaaaaaataagtcatgtataaagtactatttatattaaaatacggagggagtacaaggtgtagacgatatcatatagagacaaaacctatataaaagttgtagataaggattagatctacaattttgtagttgataaacttttcatttgagcttatctatggtgctaaatatggtttataagtttggatagcagcagccacaaaataatatcatttgtttctaagacaagaactatttgtaggtttggtgttaaggtgactttgtgtgaatagagaggacttgagttcgaatatttcttgacacgtatatgaatatgagttgaagaaataatatgaattgtgggattaagagtgtgattgtataggagcttaacaaaaatactaattttttttcaattttttagcacctacaaaaataaaaaacggctgcacccttatagatgccagttctaaattcatagtcaataaccggcacctatctaccctataagccctttagaaagcaataggagtgaaaaaagatgggtatttcctagccgctcggccaggaggctcatgggaaagttactggatagaattatatatctgatattatccgagctcaaatccaaatctattaaaagtatgaattaggatatgaggagttatccatatgtatgtcctacattatcaaacatataacaaacaaactaaatgttactattttagttcaccagtaatattacacaaccgttttctcatcgaatcttttttacactaatttcctcctagacttattatctattattagagttataaatagatatttgaatatggtttcatgaacataagatacttgatgagcacctgacagcgagcgtcccgatttttccctctttcacagcagatataaaaatcaagcaacaacaaaaattcagagaataacttggtttggcttacaagtattgcaagccaaaaccctagaaaaatcctccaccggtgtttgaccaagacgaacagaagatgagatcctctagaatcaagtgacgaacccaggatttaatctcctgatctcgcctcctccttaagatcggcaacatttcaactctgtgtagatgggatcgccatcatcggtcttccaggaacaaagctcggcaggagaaacaccaagataaaaagcatgtcgaaccggactcagaaccaactcggttcctaaatgctagacaaaaataaatgactccctgttgatgaaaaacccatgctccgccgatggtgctggatctgtgttggcgcaaactaagtcgacaacaacgacgccctgagagatttgcttagcttcagtgcagatctaaaaattgataagatgcgagcgtgccagtcagcttgatcctacaactgacaagatatgtaaacaacagat

SEQ ID NO: 51067 - DNA, 1098 bp, Oryza sativa
aaaaagaaactacatatttttctaaatataaaaagaaactaacagactctttctaattaatagataaactgtcatgccgcatcctccttgaatcggtctcttataaataactttccataattaattaatttccttaatcgaatctatcaagaatccgactgctggcgacttgacaactcccgtcggccgattctaggattctgaagctgatactgactctaggcctatgacgacctcggggcttaccaaattttgacgttaacactctagctaatcacctctaagaataataaaataatatggcatctatgctaatctctactattataaaaattgaagatgtttttgccagtactttggtacgtcattcgtgaatgagtcggtttttaattccgttttcttttggaaatacatatatgtatttgagtcggcttttaagtttgttcgtttttgaaatacagaaaagactcctaattgcaggtcatgattttctaaaaaaatatatatacgtccaaacgaattcctatagtgaatttcatattaactaaaccatataacaataataaaattaaaatagctttcacccgttgcaacacacatgcattattttttctagtgtaaaaacaacaatagaaaattaagataacaccaccaatacctaagtattgaactctgatcgtgcgtgcaggaatataataatcctaataatccggcaccggtgcctaatgatctctgttacctggattgaaccgaggagaaaaaatgttgtctcaattccttttcttccttggccgtcaaggtagcattatcatctactgatttacaacctccttaattaacaagcacgggtttcatgtcaacagaaaattgccgtttagccatggacataacttgtgaaaaagaaacttgataataggtggtgtaaaattgtgacagtacatggtatataaattgttatgttccaaacatataaatgacttttcaatattgagatttataataataactacatatatggctgtgttcttttcccctctttcaactcactttcattgtttccgcgcacacgcttttcaaactactgaacggtttactttt

SEQ ID NO: 51068 - DNA, 1351 bp, Oryza sativa
ggcccaccagtcatagacaacccaggtcacaccggccttgctccatcctagtcctaatcggagccactactttaggtcttagaggcatatacaacctaaaagactagtctgatatgtaagaactatcctcgccttttaagtcgtgctcccccataatcaattacctatgtaggactaaacccaacaatctcccccattacaaatcggactaaacaatctccctcatcacatcaacccatctgaccccgaagacttgttaccgggctcctccaccatgtgacccatggaaattgttccagctttccaaacctaggctataataccacttgttagagtgtgcagcctaacccaccaaccatggttcacctaggtcacattgggcatgctccaccatatgcccaagcgaacatttcatttttcgtgtcgaagaattttaatactgactttggggtagcaagcacctccaacattagatggaactgcatttacttatctgaacctagattgggtactcattaagataaaaaaggcacagccgactattatctggaaatggttgatattaacactaatgaatcagaactgcaagcttcattgctcccatctataacgtggtacgacccaacaaataagtatttttgtttgggaatagatttgtgtgaatggaaagtgtgtgaaacattttgtgtgaacagtacatgtgcataacatttttgtgtgaattgaattgtgcacatattgcttttaaaaattagaattgtggcccaatccttggtccacctctggtcatggcggggtagaacgtgacgttggtgtccggtgaaatgcatggacatgaatggtggggctgcaaactggcaaatctgatatcggtaatgtcaaccatctgtagatgacggtcgttagtgtcttcttgatcttggtgacacaacatgggctcatataagtagacgcggttccaattggatattgaaatgttggacacaaagaatgacgtgtcttcgacatcttccaccttggagcaccatgaattctcacagaggaggtcacacaagtatatcattatttcataccttgtccagctggtcacatgcaaaatggcacccattgaagagatatcgctcgccattcatatccaggtagctatgttggtagatgtgtgcaaatggaagcaccaacagcaatgggctcgccgtgagaggagcaacaccatcactgttactgccactgaagatggagatctctttgagtgagctgatggcgacaaacccaaaaccctaaaccctaaatagtagagtggtaagctcttgcaaatccgattcgttagttgtaatgtcaaccatctccagat

SEQ ID NO: 51069 - DNA, 3082 bp, Oryza sativa
cagatgggcattatactgtacaaaggtagtatatgatttgaaaattgaatgtggaatatatgtgagccctagttggtttcagttgtgtgtaaaatgtcaagtaagtaaaattgtgcacattagcaaataaaatggaatataccacgaatagacactgcacgaatcttgatgaaaatttaatgatgttgacataggtgaggaaagcaacagtgttgttaaaaacccttgtcacacccatgcatgcccacatgcaccttttcatcgagcccaaaatgtcccagacattttctcatttgcgcggtaaaagacacaacaagcgggttatctacatggagtactacgtctatttgtgatcacaaattaacaaaaatacaaacaggcaatggaaataaaatagcaaaaaattgttcatccatcgttggtcactctatctcataccataaatgttataggagatatatatctaccatggcacttgagcaaattgagaaaagaaacatgttctagtgctaatgcctcatacctttcaaaataaatgtactgatttattcatataatccaatatgcactctagatgtcatgatacacaaccatccaaatttcagtttcatcctttattacctggctacgctgataaccttctctaggctcacctcacgcctacagcatgctatgaaaaagcaaagagaagtggaaaaaaaagacaaactctcccattaagggaagtgttcatctgtgaaaaagcaaaaagaagtgtgacgatgacggtgggtactctggcattcttccaacgaaactagccctgtcacgctagacgatatgagggaagtgttcatctatgagattgtgctctccacgacacccatggccgtgctcgcggactcctcaaattgaaggccacattctatcaagttgtggacaaggcatggtgttgatagccaactttggaactggatcaaatctaggctaaatcggtaaaaggattagagccttcatgccaagtgtgtcatgttggtttgatcggataatgaactgcggtcataccacacatttctaggcaatcagaccttcagccctgatccgagtccaatttagatactacttatgttttcttgcttgaggccggggttctcaagtcctagtgggtctctaagactaataggacatggagaagacccattagacgaaatatcacccctcctattaacgtaggggagccaaggctgattaaaagaaatcaataaaaactgcctgtattggtcatataaacatcctcaaaagtgtctctgcattggttaaaatgtctcaagaaaataccttttatatattaggtaaattataaattgcaaaaaaatgcctccataagaaaaacttaataaaatatgctataaagtgtatatagagtaaacgtattatatgtaaattttagaggcgatatgaaaattatcaaaaatatgaaaatggatgatatgaaaattgccaaaaataagaatgcatctacatggtgaagtgagtgtagctcaactggttaggtttcttgtgatggaactagcccactcagttttaagtcttagattttttttagtggtaggcgacccgtcgacaacaagatgcctatgttgactttatctatctcaagatacgctgacccatatgtatatggtgtttatttatagcggtgagtgtacgtgtgtctgcatttgtactatatttaaagaaaatgtttttacatgaggttttttttagtgcatgcctgcatcttccgagatatgcatcttgcacggcacttaatgtagtaatccttcatatcttttgtaatgaatgtagtggtttaaccacataatccgagatcaaccagatgtgtcattatggacaaccatcgaaacatcagttacatcctttacgaactggctatacgccgctaattctgcaggctgaccttccactgcagcatgtgtgctatatatgaagtatgaaaaatcaaacagaaataatgcgaaaaagacaaagacttcccagaaaacgctcagataccatatgccgatcctgagtcttcagcgagttcctcttgtttaatttgcaacatctagctattaattgagcacaaccatttgtactgttcagttcatataatcagaccacaacgacctggccggccggtcaccctgacaccgaatgtatttttataccacaccctgacatttcccattcttcatttaattttgattcgttgatgattatgtaagtaactcccttgaccaccttgaaccaccaactatagaagggtgtagtagtagactgaggtgctgcagcgagcgaacattctccagctagtgataagataccacaaatgatgcagccacatgtgtttttagtgatatagagaaattatataaagtgctattaacacttttgtacaaaataccatcgataaacatgagttgtacaatatgcattctaccagacaagtgtatatctttactttctgacatcacaattaccaactttatcaaaaaaaaaaaactaaccaatattttttttttgaaaagtgtggtaaaagacaaaccatcaccaatattgaacttttaaaagttgcattcttagtcatggtataccaacatggtttgttctttttcaagctatagtttcaaaaaaaaacatccatatatgaatttctagaggaatacaaccattccattcagcaattttcacaaaatcagcaatattcaaaaaaaaaaactcttcgtatatgaatttcttagaaaacttatttaaataaatttttctatcttatagcagttagttatttgtttgtgcccatgaatagttataaaaaaccagccatcaccgagccactaatttccaaccatggactcgtccgctacgagacacatgcagcaagtgaagtatgagtacataaagtatgactacgagacacatgttttgctactcaaacaaacaagatacaaatttgccacacagcaaaaaggttcaaagctcctttcctaaataaacaaaacaattttgtccactcatcgcatcactctagctatttggtgccataaatgtgcctaaagatatg

SEQ ID NO: 51070 - DNA, 1325 bp, Oryza sativa
agcatagagcccctaaaccctgaaatactggggtggaaagcttgcaattctaattcgttagtgttaatatcaaccatttccagataataaatagttgactgtgcctttttgatcttgatgagtacacgacctaggttcagataagtaaacgcagttccattgttggaggtgcttgctacaccaaaacctgtattgaaattctttgacacgaaaaatgcaatgtcctcggaattcttagacacatatactaacataatacaaaatttcactaattcaatgagagaacagtaactttcaaatttgactgtattttaagctttaattggtgaaaactttcacaaccttcttcccaaaattggaaattcatttcctccattaatctaaaatctatatttattggtaagaagtaccatatgtgttttagagttttatttttatttttgttttatgcattatttggtatttcgtgattggatacatgtgactttggtgtggagcatagggtgcattaatactgttgtcccaacacaatgggaaaacaaatgcatttcagagcaaacataatgcaatttagcaaatcaaaatccgtctaaaaatgttgtctagctaacttgcaaatcatgccattgattcatcaatgtcttggctttcatctactttgatcacagagatataatggaaaagtttggtttattaagaaggattgaggaagtgcagttaaataaaactatataagccgtccaaaatcaaaacttggatgacgcaagggagatctctaacatccctccatttcatgtactataccagtttttgatgtcttattaagcttaccacaccatcacagactgggaattacttctcttctgataatttcttgttgatcagtgatgcccacctcccccctacacaaaatcatcaattaactaagccacctaaaaaaatgatggacaaaacacttgtaaaccataagaaatgaataatatgaggctttcccttgttcctaacttggagaggtctataactcccaactaattgagaggtaaaaaataatcacttttactcatgtttatcaggacggggtcaaaatttttctagtatttgaaaggtatataatatattcatagtggtagtcaggagatatatacctccatcctaaaggtgtatacctcttaattaaataatgcaaatatccgggcctaaaaaaaatggaacaaaacccatagtatcacatctatatataaaagatgaaattccaatcatattccaacctataaaattagttttggtacatctctttatatatggagagttatatctgaagtatg

SEQ ID NO: 51071 - DNA, 1040 bp, Oryza sativa
aacaaccgttggataaaaaatggacatttgagattcatccacatcaccatgagtaatttttactcataagtgaatttgtgagtaaaacttttactttaatgattggatgaatctcagacgtctattttttgatcaaacggtagttttcaggtctcactacgtatgtagtttccactgtatattttcctgtccatcactaccaacagttgataatacaactgccaactggtcaatgcttttttaagaaacacggtataaacactgccactcacaatatgcgcacaatcatccctctgagtgcgcacacgcaaatctatcattgtttcgaaagcatatacaattaaactgtataattaacaatactatatgtatgtatctgctgcattctgaggaagaacaaaaaaaaaatacctcccgacgcatgatgaattcctgtctatctccaaggacaagtaaaagaagctccacaaaacaaatctaacccatatctatcgatcgatcgagatggatctccacttcccctgcaataacaaattaattaagttttattcaagatggccatggatgaaccggcgtgttaatccaaatgcctatcgttgagaagaaaaagaaacaaaaactgcaagaaataattaatttagtacctggtggcagaagtgatcgtcaatgcaaattaagcggagttgtttggggcaacatggacgtacggtgtcgcaaagcaaaaatggtgatgaacaattgatcgtcaaggccagggaactacctagcgaattaaataagcactttgatgcgtagtgtagctactcaattgtgctatcttcatgtttcgttttggcattgcctttcataaaggaatatatccaatgctttgctctttgcttgggacacacctaacgaataaagatgaaaggtagaagaaaagaaaaaaaaaagagctcaatcgattttttatttttttagagaagggtatattttgcccggtctctacatccaaccggatatatgcagcctttttaaattaggaacttagcctatcaaac

SEQ ID NO: 51072 - DNA, 718 bp, Oryza sativa
cctgcagccctgtgcatggagagaaagagtgatacatatagcttgatctccatgcaatccttgttatttagatccaccatcaatgaacgtttctatctcaactcatatgaagtctaagaatcacctctcacaaattccactttcatattcacacgaggcaaggcaaataaatgctcatatacattagtttcataattggatttatcattaatcaccaaaaccaaattaatggcacttgaactttcatcgggccgtagctgtggcgaagtgttgcactgttgtggggaggcgaggtgaccttgcgccgttgcggctgttgggatacgcgtaggctacaatagcataaatcaaaattttctatcgcgtaaaccaggaaccatgcaagtattagatcatagatcgttaccactcgacgcactgcgcagcggaagaagacgctgagaagtcgaaggaactctcgcgaagtagcgcgcgtcgatgtaaaggaagtagtcgatcgcaccggctcgaccttctcctcctcgtgcgttctcctcgctgtactcctatgccgatcagcaccgcaaaccagcagagcctttactggtatccacacgtacagggacggaacgccacgcacagatgtgctagcacccgcgcgcggctagggttttgctcggggagggaagtgacagctaaggtttctcacgtgatgcaatgcctccgcctgtcacacccc

SEQ ID NO: 51073 - DNA, 545 bp, Oryza sativa
  unsure (1)..(545): unsure at all n locations
ttaagagcaagtttaatagtataactcactactacctccaattcatttatactcaatctaatagtcaatttatgcaaatagttgcttactgtactgttaatatatggtctcacctgtcatacacatattgcatcttagagttcgtgctgcagctagttatagaactgcagtccactgcttttctctctcatcttttactatctcactgaaatatatttatagttggctaatagtattctattatacctgctgctctaagcacgtggatactgaatgatcgtacagcagaaaagagctgcaagcgggtactatacaggaatacatgccaccactacaccgctacgcaaggatggaacgtatcggtatttttcagcccgaagaatcaaatcatcagcggtgcagtgccagtgcgcacgatgcacacatggagtcgacctgcaattgggncncccttttccaaaccccggtttttcaattgggaaaaacggatttctcacgggcgggcacgcatgggcggagcgtcacgcgtccgttccttccggtgc

SEQ ID NO: 51074 - DNA, 1120 bp, Oryza sativa
taaatcaagctggaatcatgtttgcctgcaccaaccatgatctgtagaatgcttttaaacaggcatacaacacaccattagggaataatctacaaggtttgggccatataacttcccttttatatactttcttttgcacttattttccaaatttatcggttgtatgtacatgatagataatactgtcccagcattgaccaatgtttgaagttcaattgtagcaggtccaatgcttgctttgagtacaaaaatgttttatgttttgacagtgcttttttttcaccagctacagatcaataggaactacaattatatttcattttgtcattcacaccttagcttccagttcactaaatggggatgaaggctgaagtcaacagagatatgaactgtagggaaaatgtaccttttgttactttgattaggaagattgaatgttaatttcaagatgcaaatggagatcaattttcagtctttcatatgtcagcttaagtttgttctgttaaaaatgaaatgaaacttgatttcaatgcaaatgctggggagggagttctagatctcaaaataaaatgctatctttgcttgctctatatgcgcttagcccctcatgagcggtgatcttcatgtaccatattactcacattacctgtatttttttgaatatctactgtattttttagagcatctgtgacggtgcaattataattgttcattcttgacatgcactatgcaggaatattgcttcaaggcaaaagaacgagacaacatattaggttatcccattatgaacagttaggttgagctgcaccttacatggtgggatcactatccatattttattacacacatgtaatctatttatttaaactgccctgtcaatccaatctactttatatccttatcttggtgctagcaatatattcaaatagctttgcaatatggatctatgttgattactacttatcaacgaattgccagtatggacatatgttgacaaggtgacatcacaacatgtatatacaacgtagaatctatatacatcaactgtgtcttgtgcttcacaactactccctccgtgtcacaatataagggattttcagtttttgcttgtaacgtttga

SEQ ID NO: 51075 - DNA, 2496 bp, Oryza sativa
agagaagaaaactcaaggagatcgcggcggcgcccgtacgtctccatccaatccggcaatggggtggcgcacgtacgtacgcctcacgagtcgccgccgatggagatcgccgggcgggcggccctcccgagcggcgagcgggagcgctgcctcgcctccatgtcccggagcaccaccatccgccgcatctccgacacctggtgctggtacgtctcgtccaccttcaccttctccccctcctcctgcttgatccgcctcacctggctgtgcaccaccaccagccgcctctgctgctgccctgcatccacgtccctacccatctccatctcagcgaaaacctccctcggcttcctccccctcttgatttttttttattctgtctacagagacgatggcgatcacgcgacgaggcgaatccagaccattcgaacggtgcgttgcatgagaggggcgtataaatagcggccgcatcgcgggtgtggatggatggatgggatcaggggactgaccggttcccccctctcatccgcgccgttattgcggaggcaggcgcagcagctatacacacgtgtcctgctatcccgagcggtttagacgtttacccgatcgattggtcgccgtctcggcgccaattcaccacgtacgccgatcctccatgtgtacggggttgacgtcgcgaggccgccgagtcgtgccggtctgtccattatccagagtttccggacgggatggacgtttgccgatacgattttgacattttctttcttttttctgcatgatttgtaacgatgtttgataactatgcgtgtcatatccttttctatccgaggtaaacgcgtcgtgccagttgttgcaaaagatatataaacgcgtcggttaattacgtgatatggagccgatagggactcgtcgcacaacgaagcgatcgcaagtggcaaccgcgcgagagaaacgtgtgggaattggaacagagagtcagagcctatggcaagctgggttgatatccggcagtacgtttaggacaatgtttaagtcaaacattaggaatataaattataaagtttaaaaatataaaaattatatgtatagatttgtcttgaaaaattctttcataaaagtatacatatatcacttttcaataaatatttttatagaaacaagaagtcaaagttgtgttttaaaaacggtgtcgctattgtaaacgacttcctttacgagcatggagcgagtacgttgcaacgcgattgaacatcgtcgtctacagctcacttcgccgagtccccggcccatcgagaggatgcatttaattctgttatttgttatttttctcaaacgagggtaaaggtgatctgagttaatctcagatccccgaaagccgggatatctttatttatttatttatttcaatggagagtaaggcggttggagttttgatctccgatattcatcgatcgtatagtcatatttacgtactgcaaagcgatcgagtgcaacggtcagagttttcatctccgacctccctggagatcgagtccctatcgatcgcatctggtgatcggatcgaaatctcgcgcgaaaccaggcgcctacgtaacggtgcaaaacataccgtccatcggtctacagctcgcctagccgagtcgccgaggcttttcggccgagcctcaatcgagggcaaggggattcggagattaaaactccggtttccgaaccaccaggaaagataagatgattgaatcgatgtcttgcgccggaattaccaacggatgcaccaatcctccttctagagaggattctacgctcagagacaagtcgctaaccatgtcgtgcactggcgcaggtagattttcgattttctcgttgcttgggtcacagtgatatataccaactacctggtagaaccagaagccggctacggggtttcaaaaaggaagaaaataaaacgtgaaatctatttcgagagcgctctcggtttagctctatagcgtgacgcatctcatagccgtctaactgtgcacgtcgtcatgatgtccacccatgtgggtgtctttttcttttcaaataaagttctcgtgggtatctttttcctattcaaataaagtttcctctcaaattacttatccgatctacaatccgattacaccattgtgttcgttacaattaaatcttcacaaacaagatcttacatgattatgttacgttgaaaaaatatttatatttataaattacttttattatatacataagttacttttatcatatatataagttatttttagatttgactaaattacttcttagacatataaaagtaaattcaataaagtctaaaagtaatttacatatattctaaaagtaacttaaaataaaacagaagtaactttgtcacgacattagaagtaaattcgttgtaggggataaaatatgactttttagttaattccataatttgtgctgattaatttaatttatagatagagtcatgtttttatctct

SEQ ID NO: 51076 - DNA, 2652 bp, Oryza sativa
ttccacaggccaattccgaattaatattcgcattgatttaaaagggtttactcttgctttgcaccggtattttcttagggtcatttataaattaaatttaggcttgggaggagaacttcggggtgtgacaccgccgccggcgaccacctggccgtgcgccgccgccccgctcgcctgggccgcccggaccccccttgtcgcgccgcgtcgatctcgtgcgccgccgccgcccatgcgtgccgcctctcccgcgccgcccgtcggtcgccgtcgccggagaccgcgctaccgccgcgccatggctcagctaggccggctttgtgccgtgctgtgccccagccgcgccgcccctggccgcccgatcggcttgggccgatccggaccgtcggttcccgtggaccggtggtggaccggcgcccttgtgccgctgaccggtggggcccgcttgccggcgccgcccctccccctttgatgacgtcagcaaccgtcttttcctttggaaaaataaataataattgcgtcataattcgttaataattctagaaatccatttaaatggctcaaaacttctaaaattcatatctaattcattcgaactccgaattgagccgttcaacttgcaaaattcatctaaaattgagctctacatgtttgtttagtttttatgtactgtttccttggtttttattagagtttttcctcgttttgcgtgccagcgtgtagttcccgtcgtttcggaagatcgcgttcgcaaggataagagttcagaagatccaagtgaagaagcaaggcaagtcacacattccctttgagcatgttgatcccaatttataaatgttttaccgtttacaaataaatatgcatgttttgctaattacatgggatccgggtattacctatctgctcgcttgtgccatgtttacttgatatctgttctttgtcaaccttagataatgaatcgactagctcatgttacttatgtgacctagctagaactatatgcttagccatgcttaattaccactagctcagttgatgggataattacagtattagacctttttagtatcagagtgagctgcgtgctcgagacatctggccatgcttcatggtcgtaattatccaactaaaatgcgactgaatggtgggctgtggctgcatggttttgctggtcgcacccatggcagttaaggaccggttcgcgggatgccttggaagaacttatcgtacttaccacaagccagcgtgggcaacggctgggcttgtagtgtagctttcctctagtcgacgcatccaggcaagggtgggcgtgatggagcggggcgggccctgcgacggcctctgtcgcttccggattcacctaggcacgagaggggactgcctgttgcccgctggggacgggggtgaaacctgaggtgtggtgtgcttggctagagggggttatgcgaagggtcctgtcacggcctctttccggtatgtcgtggtggcatgtcggcgcacggaaacgtgtcgtggggctgtgtcttgtgggtacagttgtacagctctgataagagtaaagctattcgaatagccgtgcccgcggttatgggcggtcgaccagattcaccgtgattagtcccatcttaataaatcgacccaatacactgtagttcaggtgggttggttgggcctgttcaacgtggtgtagcgttgatcagtggagatttaatgttactttaattactcaacagttttactgttttgctcaataaaatgttttataaccgcctttatgcaaatagccacaaaccatccttgtatccccttgcacatctgcatcgttggtgtggcttgctgagtacggtggttgtactcagtcttgcttttattcccccttttcagaagtgtagtacttctgagctgaagacgaagttagaggaccaaggctcagaccccagttgagttttgcctgtggagtggagctgaagccccgctaggatcgccttttccgctgctgctgctttcgtttcggtgcgaggactaagtgcctcttttgtaagtattttacgctttatttacgtttggaactgtatattacttgtcgttttgtgtaccctggctggtcctggacaaggatttaatacacaaaatagtctggagatttgggctaaatttctgggcgtgacaagagagatggagaggggataaggttcactcatataggggataaggccgatgcgtcggcctagattggctcggcagctcggctcagtttggataggtgccggtttttttaaaaaaactgatacctaggtgcctttttaattaaccgacacctttaatatattaaaggtgctaggttttaaaaaaccggcacctatactatagatgtcggtttttctttagaaccgacacatatagttgcttaaatgtgtcggttttatgtgttttcagcctgtggaggaggtaaaatcactataggtacatgttttagttgttcccgtacctatagtgctgatttttatggatttttttttagtagtacaccgtcatgacttttgcaatgcatgataataataccacaccgtttctagctaccaaacggctccaaagaataggtcacattgtcatcgccggaaatattctccaaccgagatgctctaaccagta

SEQ ID NO: 51077 - DNA, 1767 bp, Oryza sativa
aaaattaccggggatccttgatatgcttatagactaatttttgagtgatataatgcttaatatgaccctaaaacacttagaaatagataagctacccggtatccgaagacaccgggtagatacacgtaggtacgcccctgttgctctcacgtgtagaaaagcagaacaagcaaacagcaaactttgtagttttgcggctttgtcgcggaggccaagcgggccttgaaacaatggcctataaaacaagggttaacaatggccaggcggggcacggaggccagcgagccttttcgagtcggtctcggcatcctgtttcgatcttctacggtgccacgtttgtatgtttgcagtgttagggctttctttaccaaaacctagtcatgtttatgttttggcactacgaataatttgatatgatagaattcttagtaatgtgtttaggttgatacttagtcattttagcatttcccacatttatattgatgttaatgaatatagatagatatatatatttagattcattaacatcaatatgaatggagaaatgttagaatgatttacattatgaaacagaggaagtaccaattagaaaccaaattttatgttacgatgaagaaaattctagaattataccagattaagtatgggaattaccatccatttcgcttcaaaccaaaccatcatatttactattcaaactataaaaaaaatagcacggcacattttggcatcaatcaagtggcccttaatctcttgtcgtaaaattaaggccccgttcgttctaaagatttcctcggtctccattaccaaatatatttcaacctgtttaaaaccgtgcaaaaactttcttacataaaaggataaatatcatcttgaagtttaattatggcttttctaccgttttcctattcgaactagggcctaagtatacgatacatgagctggtactgacctgaaacatgtacattacacgatccgacagaagaagtcagtttgtttccactccgaacgagatcttccaagaaaccagcataaatccataatctagaaaggatacctttcaaggaacatgtcaatagactccaatgaatgttcccaataacaatgtacagtagatactggctggagtaccacataaaaatgtgcttcagttaacaagaacatcaaagaacatgcatataaccctttgcataaaaggggagcgtgctcaagttgttgaacttcgattaactacttcaagttgtgctcaagttcatgcactcgataacactttcacaaactttggtgtaaagtataacagctaatcctaaaaaaaataagttgcaaacagcttattcgtttgcattgcatcttttaccaatgcttgcaccaaacaagttgcaattcccttgttcacaagcttgatccaaccctacccgcatcgaccttcgtgataaaacaggtaaaagctattattcccactgatccaaaaataacctagtctcacatttgcaacaacctttttctggagaaattgatgtatcatgtccttcataggataaatcaagagcaaatataacgagggatgtgctccaacttactttgtaaatagtgataatcaccagagtggaagagttataaaggaaaaacaacatcatcacggctttggactctaccaaatgatttacagagagaatcactactaataagatgaatttacctgtagcagctggtttttatcagttttggcccagcctaccatttcatcgcctaccgtgaacaaatgca

SEQ ID NO: 51078 - DNA, 1262 bp, Oryza sativa
aaatatgaaaacatagatcaatatgtgataaacatgcaaattttaaatttttaacattgaaataataaacatccatatgccatgagataaccattcatgatgtcggctatcgcattagtaatttctcgttaaagactctcttagaaaagaaaaagaaatatctttgaagggagcttaagccttaaaggctatgcatgcacatgtcgttgtacggcttcacggaacacctccaatgcctcccccatcactttctcctgcctaacttccgccgcgcgcctctgcaacggtggatgtgtagtaccctccccatttccaaacttcatgagtgcctcccagaagttcgggtttgcacgtgggtcatatcctgccgcagcctgcagcatgaggccgatgcggtctgcctctagttccgttctacgatgatcacaaggcaaaacacagtaggcgttaggcttattgagtaatctgtgttatacatatgtacatgcatatacgaggtgtcacctgtggaggaaattccgcataaaaagggacacccactcagcgtgcgggatcctatcgaccggaacatagaggagctcctcaacaaagttggcaaggacggagacccaaaatttgttccgcttcctctccacacggtgccttgcgatgacatgcccgacctgccaagaaagtttaatgtatgtaatcatctacccctgtgtttcatattataaatcttttaacttttttctagtcaaactttgttatgtttgatcaaatttatagaaaaatttagcaatatataaaatattaaattagtttaactaaatctaacattgaatatattttcataatatgtttgttttgtgttaaaaaatactgctatatttttctgtaaactaaagtttaacttagaaaaaagtcaaacaacttacaatatgaaacggaaggagtactggagattccttcgcccatataaaaaccatgtatacacactaatcttgtgtaatagtactacatctataactaaaggaaaaagtaccaattacccctcccccgaactatcgcggtcggccgaattaccccctgaaccataaaaccggacattcttgactccaaactatacaaaccggacaaattacccccgtcgactaatccgcggtggttttggtttacgtgacgtacgcgtggcagtccagttagcattctatttataaaaagatgtgggacccacctgcctactctttctctctcttctctctctcactctttctctctct

SEQ ID NO: 51079 - DNA, 508 bp, Oryza sativa
catgggtctcgtcctctcctgcggttgcctctgccgcagccgtagccgtagccgtagcctgtcgccgccaccgccctcggataggctggatgttcatccatcgttctggaaatgggagaccgagccggagcgcggccgcgtcttccgctgcttcgacaccgacggcgacggacgacacctctcggccgcggagataagggaattctacgggtgcgggaaggccaaggagacggtcgccgcggcggataggcagaacggggacgggttcctcagcatcgaggagctccgcgcggtgatggaggacggggattcggaggcgctgcatgcggtgttcgacgagtacgacgaggacagcatcgaggagctccgcgcagtgatggaggacggggattcggaggcgctgcaggcggtgttcaactagtacgacgaggacggggacggtgtggtcacggcggaggagctgcggcgcgcgatgcataggctcggcggggtggatctgacggccgag

SEQ ID NO: 51080 - DNA, 569 bp, Oryza sativa
tgcaactttgatatagaaagttttcgtacgaaacacatcatttagcagtttgaaaagcgtgccacgagtatccaaaatttcatcccctctgcatagtggaaagatgtagtttttacgatgctccttatgagtagtttttacgatgagaaatggatgaaaatttagatacttgtgtcatgcttttcaaaccactaaacatcgcgtttcgtgcaaaaactttctatatgaaagttgttctaaaatatcagataaatctattttttaagtttgtaataattaaaactcaattaatcatacgttaataccacctcactttgcgtaaaccacttaatcttcatctacgggagaaaagaataccacataagtaatactaccatattaattaattaaatagtgataatagaatgacttttttttactgattgtagggctcataaatcgatgaatcaatggttaaccttaattttaaaaaattttaaatttaaccccacaacgccataataattactatcgataatagaatgatctttttttactgatagtaggactcataaatcaatgaatcaatt

SEQ ID NO: 51081 - DNA, 608 bp, Oryza sativa
cagcccatcccgatctcttcgccagttcttccgaatctcggggtcgagattccgtttaaggggggtaggtttgtcgcgtcccaaatcgactctaaaattcatcctcgaaattgtgcaaagaataattaaaattcatgtgaaagcctccaacaattaaaatgtgcaaagataaaagtcaaatgaggcttggaggatttttgtatatttcctaaaagcctaaaatgtgtaaataaattttagtggaattttcagagcacaaataataattgaaaagaaataaacaaagttaaaagggttttataaaaagaaaaatcctaaaaagtcttctttcccccccttctttcttgggccggctcggcccagtccctccctctctctctctcttcccccgcggcccatcggcctcccccgcgcgcgcgccgctgacaggcgggcccgcccgccactctcgctgacgggtggggcccacctgtcatcgacttcctcccgccgggcccgccgccctgcccgtgccctagcgcctccgccggcgcggattccggcgcatcccgccatccccgcacccattaaagagggggaaatcactccccgtgattccttctcccgtt

SEQ ID NO: 51082 - DNA, 722 bp, Oryza sativa
ttcctgcagcccgtgggaagccaaagaccttgcctcaatcacataatgataagggtaagcttaaggcaaagtcatcatctggattgcatgatgatgatgatattgatgtgctgatcactagtaccttggttggaatcaaagataaccttgccaaaccaatacagactgcagcccctcaagatccaaatgcccctctatgggacatgctcaagaagattgccttagaacctgaagataaaatgagagttggactacacctttgcaagccagaatttcaagctcatcgcagttttcttattagcatgggtcaagaatatcttgaacgttgggtttacaagttcttatctggtgatgatacaggcctctagtgagctataggtgcatattggttgcaaaagctaatcgtggttgatgagggtctatattttgctgcacccttttggtcatgcaattgccgcactatatatgtgtttagacaattgctaaatattaacatagatactatgatgatgcatgctgtgacatgctaatctgctagtagtgttgctttctaacttttggacaagttgataaccctagctttgtggcccttttcttttgtcttgtttaactcgtggcattactggctagaactgatctgtatgatggctgaaacttgatgttaaatatattcactatttccctgttgccatttgcatgtttaacaatatgtgatgctttta

SEQ ID NO: 51083 - DNA, 582 bp, Oryza sativa
tgaacaggggaccgaacggggccgaggggggttcggccgaacccttggtttggccgaaccagggagctcgccgacgggctccagattcgcgcacgggagcccgacaccgtagcaaggggctgcgcccacagtgcattcaccccttccattgtatagtgttccactgggatctattgtttcgccggtgttggctctccgtcaagattgtaggtagagttggaggaggagccaatgtatgggatcaaggacttgccagccattggtgaattggaagtgatggagcaagggaattgagatgagatggagaggaggattgcaaaagtgggagagaggaggaagaacaggtgctctgggtctgatacgactaatctacctccgaaagctcatcacaacggactgcaaacgagcgggggagactgctattcaaagttggggctgatcgggtgccgcttttatttggctgaaccctggtgggtccgactggccgccaactttttcctaggcccactaaatcctaagctaagcacaaaaatgacaactttaccgggttttaagcatgcattagatgagaccattatggtt

SEQ ID NO: 51084 - DNA, 804 bp, Oryza sativa
attcctgcagccctatgcatttgagctgactaatcagtttgaaccggtggaattactgaaagcctatctacaggaggtcaagagtgtgccacatttcaagactggaaagatatctctgcaagtacaggtgcacttttttcatttcaattttaaactgtatgataccctgtaaattttctttcacagaaccagggttcaagattgaagtgggaaacatagtaatcctggtctgctctgattttctttttttttaaaaaggcatggtttaatttagttccattttttccctcgaacatgcaggagggaatttagttgcgaaaattatcactaagaatttcaaaaccaaacactaaatcattgcaagacttcccttaaaaaaaatcaatatacacctgtaaaggctgagtgaaaatggagtcgaaatgaacaggattgcttgtagattgtagcaattctgttcgatggatcggttgccagttggtgacacatgcattcattctctaattgaatacgataaaagttcttttttcgtgaaaattacgacaatattgtgctggagtatttggactgaaagcaacttgttctctagtattctttcatgtggcaccatgacatcctgtcactacaatccacaaacggctcctcatgcttcatacctagtatagagattgttccagaatttccttggattgactagtttggatgggatttttcttagatccatgaaagtgaatcccgtgtagaactactagttacaccaacttttgtaagaagctctgaaccacatgaaaagttatttttttc

SEQ ID NO: 51085 - DNA, 717 bp, Oryza sativa
caattaaatctctagttatattttgataaaaaaaattaacaaatgtgccatactaaattgtggcttatcccattcatgttatatctctctaaacaaataagaaattggaatcatcctatccatacaaaccaaataaaagttagatcatcgtatccaacagagcatggatgaccatatattatccatgtatggctttgaagcaaacgcaccctatgtgatgggatgtgatatagcacgaagaacatagaacattaagatactgagtaaatataccatgttgaaatcaattgccaattataccccttaaagaaaaggcaaataaacgaaaattgactaagacatctatatatatatataaagttttcgcaactaatgttgtcacgaagaaacaaagaaatacataattctatatagcttatccagagggggaaaccctaagataagtataataaaagggtggttccaaccgttctgtttcctcttcaaagaatagaaaaaagaatcttttttttaactaaatttgacgctgttcttaattatgatgaaatcattcttagctttttccgtggattatggacaactatattaattacaaagtaattacatcaaaccaccacagaaagaaagaaaaaactcaaagaactacaaatcattcacacatctatgtttcttatttgtaattgaccagccataccaaaaaggaaaaaaaaaaaacaa

SEQ ID NO: 51086 - DNA, 737 bp, Oryza sativa
tgtgattgattaccctgaggctagtgatagtgaagatgagggtgatcatgatatgtatgctgctgaatggtcatggactaacaaaaaaaagccttttgtttgttctaacttaatgccgactcctcgcaaagatcggcaaagtgaggttaaatatagttttgatgtggccaagtgtgataagatatttgattatcttttacaagaaaaaaaattagattacctaaaggccatatcgtaccatctcaagaagaattgaaacgtcgagcttattgtaaatggcatgattctcattctcattccactaataattgcaatgtgtttcaacgacaggttcaatcggccatagatgaaggacgattgaagttcaccgatggctccaagatgaagcttgatcatgatccttttccggtgaatacaattaatttcaatgacaagaaggtgttgatttggccggagcaagccgaatctactaaaggaaaaggagtaatcattggtgaaccaaggccaaagatgatagtaccaaagaagccggaggttggtgtttggaaagagaataaaagtgaagcttcaacttctaaagctcctaggaagactaaagtgacccttgatatgcttttggagaaatatgaaaagcagggtggtgagagagctcacaacaaggggaaaagaccaagatcacctctttgggagcgatttgttcactcgctaagacggtcgcattcacctccgggggatcc

SEQ ID NO: 51087 - DNA, 838 bp, Oryza sativa
ttcctgcagcccgtcgcttaagttgttcctccccgattctattcccaggccgcccacactattgggccgcctcatggaccacgtgtacgcgctccgtatggaacaagttcactttaggtcacttcagctgaactttttttatttcattataaatatattttcttaaagagctcatatcatataaaactaaaccttaatcttataaaatttttatatttgttataattttaattagccgtcgcaacgcatgggcattttttctatgtcaaaaaaaagaccacgacatacaagtgagagatatataccacacacacccgcaggctcatgtttaaatgaactggcaacatattttcaattataggtctaattgttttatttaggtgattaaatttgttttcatttatataattagtttgctctatttaagctttttaaaaattgctaaaaatttgagaataacttttcctacttcgtattatattatttttagctaatggaattaatggaaaattaattatatattttttatcttttttatcaaaggttactgcaattttatttcattattattattattattattattattattattattattattattattattattattattcctttatatttttttcccatctgtataaatgattaaaattacctttacccgttgcaacgcacgggcacagtaaaaaacaaaatcactctggacaaggtccggcacggcccggcccggcccattgctatcttccgttccacccgctcccgttgagctcaattatctctctccgatccccttccttccggatccatcacccccaccactacatcaccc

SEQ ID NO: 51088 - DNA, 730 bp, Oryza sativa
ttcctgcagccctgatattcctctccccctttagcatcaaagcaccaaaaagagcataataagggatatgtgagccatgagtatcattgaatgatatataaaagaatgagtagattgcatttgtgatacataaacttgttaggtgggtttaatttagtacataaacttataaattgctcattttggtgcacaaacttgtctaattcgtgcaaaccaggaccacaatggcttgaaaaggttaattctagcaagctaatgttgattagaatgtgacgtccatacgtatagtgagtacgcataagatgtgctatatttataaatgaggaatttcatatatttcttaccctttctaacccttgtatcattgctcgggttttcatatatgtcggctatcactatttctcattttatcttttcattgaacaggtgtatgtccaaatataaatcttctcaggtatgtgtttatcctaactaatacctaaatcaacaggattagccatatagtgtacttttggccttggtccaaacgcactggacaagttcatgcaccaaaacaaacattttacaacttcgtgcactagattacacccacaagttcatgtactgctgatacaatttactctaaaagaatcaataattcaagtttttaataaaacaaagtttctctcccctttgaacttggatttctcttccattgtaggaccattgaaattttagtaagtgaaagcac

SEQ ID NO: 51089 - DNA, 731 bp, Oryza sativa
tggtatacaccaggtcaactttgtcagacatgatcagggtcctaactggcgtgctgctccatttactagaactggctggtttttattgcttgatttccccctagattacatcaacatgcagtacatttgtctggttgtctcttctttcgggcagttggaggaatggtatgaaaatgacccaatagagggcagagttctggtcagagctatgtttaaggactttgattcagtccaaaggaaaattgttcttcaagatcccacaaggggtgctggtgaatcttggaccatctctatttttaccttggagggtgattttgctaatatttttccccctgatgaagaccttccccctgctggtccaaataatgatgaaaatcctgatggtaatgatgatgatgatggtaatcaggataatatttggcaatttggaccacatcctatggttcttgctgaagaagaccaggattggaatcaggctgctgtgggccatcaggccatggaccttgaacaggctgctcctgagaacatgggccagattgataacaaccatggctggaatctagttgctaacagaggtttaattttcacccttgctgatgctttcaaagatgccttcaattcctggtctgccaactctctggcaaatttagcccttcatcctgcaaggcttaattttaatttgcggaatgaaattgtgtcgtatgattctttttcttttgaattttttggtg

SEQ ID NO: 51090 - DNA, 752 bp, Oryza sativa
attcctgcagccccattttatttaattggttaaatgaactttgtactattcaaattatttctcgagctccgaaaattcgcgggaaatttcagagagtattttaaggcacaaagaatattacaaaatattctcggccaataatttttaaaggaaatttttaattccctcaataattcacttgattaaattgctttaaattttatttaatttctagaaaatacattatttaatgatttttaatcccgaacaaaaatcggggcgttacataggtgctaaatttgggtgtaaacagctgtcacattgaatgtttgaacacatgcatggagtattaaatgtaggaaaaaaaacctaattacacagaattgcatataaattgcgagacgaatcttttaaatctaattgcggcatgatttgacaatgtggtgctacagtaacatttgctaatgacggattaattaggcttaataaattcgtctcgcagtttcctgatgaaatctttaatttgttttattattagattacgtttaatactttaaatgtgtgtctgtatatcttatgtgacaaccaaacccaaaaattttccccaactaagggcctgttcactttgatgtcatttttaaccttaccaagttttagtaaagttaccaaaaaaaaagtggttacatttagtttgctgccaaattttgataactatataagaaatcctgctaaaattttggcaagttaccaaaatttaatatttttttggcatc

SEQ ID NO: 51091 - DNA, 729 bp, Oryza sativa
gcaaggccttccatacacctcattggttcaacacgctaagttaacacacagttttaagtatcctaggttgcattgatgtagaaggtgagtgctgcgtactgcctgagattttcagagcacaaaaggaactttgaatgcaacatgtatttctttcccagtgctgtttgggatatgaaacaactagagcagaaacagtgaagcatgccagctgaatgctgattactgaactaaaatgtatatgaagagtgtattcacagcaatctcttcatgaaaaaaaatagaaaacccaagtccaacataataaaaggcatatatttgagccccatcctctagataatcaatcatattactgcattgtctaagtgcccaaatctcaaaatagtttaccattcccaggtaaagtttgacagcatctccctgttaaattacattgctagaatagagacataaataatagcaaatggtatttcctctgataactgccaaaggagaagaaatcaacaattgcccaaacatgagtaagaaaagagtactccaattgatagtccgaaatcgtggatctcaagcagcgaggaataattacctcagatggtgacaaatccgtgagtagaaaacagatcaaggcgattgctatgatacaaggtctatatacgaatagatgatatggttggttgagttgttggaggtgggtatacatgcattttaaatcatggataatctttttgttgg

SEQ ID NO: 51092 - DNA, 741 bp, Oryza sativa
tctcaataatcaatagtcagtacttgatctgaaaatatgctataaaacatgttaaatggctagctacttttgagcaatattttatttttggacatattggaaccaccgactagttactaactagtcaacagccgctagtcattgaccgaccactgactagcgtctaggttaatactgtttcaaaaccatgcgggtggcaaatctttcaatggttatctttttttgtttaatgcatatttgcctcctaataatattaaccatatttcttagatattcgtattattctttttctaaaatagatgcacaaaagcacatcccagtatgtaatcaagctcaagggcaaggtcggcgaattgaatgacgtcctcttagcttgttatgctccagaatatatgatcatatatgttatttataagttagtaaatacattcagttaaattaagacctcaactgagcatataacatagcttagaagctgtggaaactttgctgccactaagtacaatacagatactagatagtgaggttcggtgtgcggctgccaaattataagtagcagcctgcagattttccatacaaattatctaaacagcaatgctacaattctgattacttgtaggcatctcttgctgcagccactaactagaaaataaatcccatggtatagatatatagatatatgaacaattattgaagtggtcagaatgtgttctctaaacatctgaatgacaaaaagaaata

SEQ ID NO: 51093 - DNA, 748 bp, Oryza sativa
gtgatgttagaggagacaagataaagataaagattaagtgttcacaaaaaaaaaaaaaaaccccaaaaaaaggggggttgggggggttttaaaaaaatttaaaaaaccgggtttggggtgggaaatttaaattttggaagttttttaaatttaatattacaaacttgaaaatagattaatctgatattttagaacaactttcatacagaaagtttttgcacgaaacacactgtttagtagtttgaaaagcgtgccgagaatatccaaaattttatccgctccttgcagtggaaacgaactggaagtgagaaatattagaaacctgcttataattgctttttgaagtaatgctcttgaagaagtaggaatccaatagagtttgtcctcattatcctgaggaacaatctgaacctttgatatgatttgcaccatttcctagtcaaaaatttgattgagcttgtttttagaccaagatctaaaacagtttgtaacgtatgatttccggacaaaaaacccatcattctactcacggataacacatcagcttctttaccagctaatcatgacacttacgggcttagagcattcctagctgcttgcttatctatttcgtccctcatcaacagcaataacatcagcagctaatctagtagatgcaccaaccctatctttaaatttagcatgtgtgctatcttggaaagagaaacaacaactttggtgttgctctcttcttacgggctgcaggaat

SEQ ID NO: 51094 - DNA, 1113 bp, Oryza sativa
tttgttgatccttttgctgcttatgagactgctcgagacattgctagtggtgagggtccctctggcacttctcgtttcttcaatgaggagtcctctcactccgaggagagcagtgatgatgaggagtcaaatgcccctaccgagaatgttcttacagatcccgatgaggcagtggacgccgccgggcaagacatcgactctcctcactccggcgacaccgagatcattccttctgatggcgatgatgatgaggcttgatcctcttcttcccttgtgattttgtctctttttggtgccttgatgccaaagggggagaaaattgcaaacgaaggggggtcaaaattttgtttttgatgcttactgcctgctatctgtataatccggaagttccggatcctcttatctggaagttccggacctgacagctccctctccttattgtcatgtcagcttatccggaagttcctggtattttatccggaagttccggacctggcaatcctttgacccctattcttaagaactcatggacatgttctaattctctatttgtgtgaatgtaatgtctattagatgctcttagccgccctttatttatactgctcttcatttatgctatgagtgtcttatttgttgtttgtgttatgatgttgattttatcctcttgagtgctcaccatgtcgtatcttttgcatataatatctattcttactgctttttgcatcccatgaatgagtagggatgaaggaaactctcctcggttgctcccttatatatatgcatatgagcttctctcatatcttccatatgcatacattaagggggagtttcatttacctttaaccattcaaaacaaaatttaattcaatcttttgtaagctttaaccatgttgtcatcaatcaccaaaacgggggagattgaaagtgcattaatccccctagtgggttttggtgattaatgacaaatgtggttaagggactaatgagttcattgagtgactttcaggtgcattagtccaaggtgtggaagatggatgcttggagacccccaaaaaagtacaaaatcaaagcggaccggaactcgagaagggcataggatagtttatcttttga

SEQ ID NO: 51095 - DNA, 1625 bp, Oryza sativa
gggtgatcggttttgcatagttaatggacctcatatatctggttttgtggtttgaggacgtttttgtaactcgatgacaaattgagggaccttcggtgtactttttccatattttgggctagcgagatcgcttatggctccttttgtagcccaatccccgggaggaaggccagcgggagaaaattcaacgggccaaatcttcttgtccatttggaagcctacaaggtgggaattttatggcccaatccgcacagaatcgtgaggtcaagaaaatttcctctagctcgatacattgcgccaccgcttctccatctcgcgattgcgagcagacgatgccaccgagcctcctccagcgagatgctctcaccggtcctccttattcggtctacccctaccgctctatccctctctccttagatcttgggtatgcccttcttctttcccctcttctcctagagtttccgggtttcctatttgacaaagttggtgatgagccgctctgtcctaaagtgaacaagagttatgttatggttggcatgtctctatcttaagaggatttttccattggaatgggttagtttatctcttagatttagggtattttatataaatagatggccatattgaaagggtcttgagaatcgttaattttgcctagaggaggggtgaacgggtgctttgtgatatttcaaaacttgcagcgagattagaactaactagacaaaccgacacaacttccggtagtccaactatagatgagttggatagttcgactgctgtaggacaatccgattagtgcaacgataggaaaaatgataagtgacccgattgtccaattgctccaggacaatctggttaacacaaggatagaaacttaagtgatatagtaagaaacaaactagaaggtccacttaagcatgctttctacaagggcaagtgttgacggtcattatcgatcagttgcgaccgtcaatattaccaaaatagaggagaactagttatgcttgcaatacatatacaagttagaataataatattccactagtattgggtgtactaaccttttgcagagaataaccataaagtggagaagaattgatatcagcacatttcataaatctatcgcacgatgtcgagaatccaacttatgcatgaatgggccaagaactcagaattgacataatgcattgggccaaaattcccaagtctaagaagtgaagtaatggaggaggccacatacagaattcggccgaaccccctagcaccgttggatgcagggtttattttggatggcgtggatcactccccaatgacggttggagagcaattctgaccattccaactgccaccgaccatccccaaggagttcactctattcacttcaacacacacctcaagcaagagctctctcatattctctcaagttagtttagtattcttaagctagtggaataggaatatagtagaaattaagtatgggtttaggtggcttccttttctttttggtaagctttgtattttattttagaataatttttctatatccatttatggtattgaaatactttccgagtatatgaatacgttctttacattatgttcatgttatactgaatatactgcta

SEQ ID NO: 51096 - DNA, 1039 bp, Oryza sativa
ttgacttctttcttagccaattttgttttatgtttggaaaagtttataaaaaatataggaacattttcaacataaaacaaacatagtatcaaaatatattcaatgttatatttaatgaaactaatttgatgttgtagatattactatctttttctataaacttagttaaatctaaagaagtttgattttaaaaagtcaagatgacttacataataaatgatagagtaaaatgcatgcactcaataagattaaatatttttagggtagagaattaaaaaatgaattaaacatgaaggtgctactagttaattctatatatacataataaacgcgttatattatagaacattaaatctctactacttaaaaaataagaggtgcttctatcgtccgtcaaaaaaaccgtgggaaaaaaaaccgtgtgaaaaaaaccgggcaaaaaaagaaaaaaaaagactctgtccgataaaaaaacagacgaaacaaacgaaaaaaatctgcgagcgaaaaaaaaaaccaaacctgtccgatccaaaaaggcgaaagaagggaaaaaaccggccaaaaaaaagaaaaaaaatatgtccgatccagaaaaagtaggggcgaaaaaaaggaaaaaaatagaagattctgactccgtctacacggtaaaaaagggcgaaaaaaggaaaaaagtctaaacgaatccaactctgtcgacgcggtaaagaaaatggcgaaaaaaaataaaaaaaagtatctgtccgattccaaagaaaatcgaatcctattatatgtgacacagcgtggtaaaaaaacaaatcgaatctgattccatcaacgcggtaaaaaacaagcgtaaaatttttttctgtccgattccaaaaaaaaggttgcgaaaaaagttttccgtttctctttctctatctcaatctgtatctctatctttatctctactacttaaaaattaaaaagtgtttccatcgtccatctgtgaaaaaaagcgtgaaaaagaaatcgggcgaaaaaaatcgaatccgattatatgtgacgcggt

SEQ ID NO: 51097 - DNA, 1255 bp, Oryza sativa
ttttaaaaattgctaaaaatttgaaaataacttttcctgcttccgattattttatttttaacctatggaatttaatgaaaaataaatattttatttttaatctttttaatcaaaggtacctgcattttaattccataataataataataataataataataataataataataataataataataataataattcctttatattttttccccatctgtataaatgattaaaaatacctttacccgttgcaacgcacggcacagtaaaaaacaaaatcactctggacaaagtccggcacggcccggcccggcccattgctatcttccgttccacccgctcccgttgagctcaattatctctctccgatccccttccttccgcatccatcacccccaccactacatcacccatccccatccatctctcccccctccctttcctcctaaacttcagcggccacacccctcgcgagcccctcctccttatactcctccgccgccgccgccgcgtcccctcggtgcccccctctccgccgcccgccgatccggccccgagaggtgaggatccgcccgtcgctccccttcccttcgctcccgcgcgttagatctgcgccgccgaccccaccttgactggcccgcggcgcccccgatcggcacccccaccgtcgaggatgaggcgcgggggttaggtttccggtggccgccgtgcggtgcgcggttcgcggctgcttttttttttgggttaatttatgttgccgtgtggttcatctgctttagatctgcgccattttggttggggggaaacgttggttttgacgcggttggtacgaatcctgcgtgttctccttcggggctgtgattttgggggcggattgggagggcttattatttgccgtatgtgtgggtgcttctagtgggatgttacgtttgtgcgttggtggtggtggtattggtctcttgtggttcgatttggttcttctgttaccctgatgtgatgaatcactcgccgcacatcaaatttattcttctgcgttgctattttgtggttcaatttgtgcctggaaaggttgcaatttgtggttttgaaaatgtgcctggaaaggtgaaaaattatgttaacgatataccataaaaagctgagagggtggtccttgatctaattcgaattaagttgtctgagcttcattcaccagctgaaattcttctgttttaggtatcttgtttttagatctgttgacgacacagggctgcaggaa

SEQ ID NO: 51098 - DNA, 1912 bp, Oryza sativa
ttgtaaatttgttttattttgaatttgatttgaaatttcagtttaagttctcaattgccatataatataccactttaatatttttttccaaattcaaaaaaattgcaatttaaacatatcttttgaagatagtatcagagacaaacagaaaagaaaaaaaataaagagtgagagagagaagaaaaagaagaagaaaaagaaaaaaatggttttttttttctctcgactattcactcttattctttacaaaatgacagtttcgtttgtaaatttaaagagtgtgagagagaagaaaaagaagaaaaaaagaagaagaaacagaaaaaaaaaagggagagatggggggtcgaaagaagaaaaaacggagaaaagaagaaaaatggatgaaatgggggatcgaaccctgctccatagggttagagtagaatcctactaccactatgctatcgttgagttgatgaagatgaatgcctccgtagaaatttaaatcatcaagacctcagcgccaaatatgatgactcaacaaattcatgccacctcggatttgagcttagcgccaacaaaagttggcgctgagacgttatagctcagcgccaaggtccatggcgctgagttcacggcctatttttggttgaagttttttgcagggactagtttcgaaataagtttttaaaaaagactaatttgttaaaaaaacggtggttgtggcggctccattttggggaattttttttgacttagattctaatttgctacatcaatgtctgaacccaacaaaccaacgtaggtgtccatcaattcatctagcaagaaaaatcatagcagcatacaagtggtaaaacatgttgaaggatacaaatatattacattgtgaatctatcaaatattaattaagagagccatcaatgcgagcagtgcttttgcatacgtagcaggtcgatgaccacatccaccaccctagaatccattgccacctctagattggtgcacccttcctctccactaccaccattccgccatggctccaccctcattccgccatggctctaccctttgaagccctgccactaccaccatcgctgaaaaaaaagtaaagggaatatagggactcacctacgctggctagtaatgatgacaatgatggacgaggcgttgctcggtcgatccggatggggcgggagctccgtaagaagagagcaacaccaaagttgttgtttctctttccaagatagcacacatgctaaatttaaagatagggttggtgcatctactagattagctgctgatgttattgctgttgatgagggacgaaatagataagcaagcagctaggaatgctctaagcccgtaagtgtcatgattagctggtaaagaagctgatgtgttatccgtgagtagaatgatgggttttttgtccggaaatcatacgttacaaactgttttagatcttggtctaaaaacaagctcaatcaaatttttgactaggaaatggtgcaaatcatatcaaaggttcagattgttcctcaggataatgaggacaaactctattggattcctacttcttcaagagcattacttcaaaaagcaattataagcaggtttctaatatttctcacttccagttcgtttccactgcaaggagcggataaaattttggatattctcggcacgcttttcaaactactaaacagtgtgtttcgtgcaaaaactttctgtatgaaagttgttctaaaatatcagattaatctattttcaagtttgtaataattaaaactcaattaatcacacgttattaccaccttgttttgtgtgaagcacttaatctttatctttatcttgtctcctctaacatcacctctttacagagtaatctccttttgaaaacttggtccactaaatacattccttctaa

SEQ ID NO: 51099 - DNA, 706 bp, Oryza sativa
gcactaagataaatcttgatctaatgctaactgatctaggataggatctctccttatatagatggagaactccttatcctaatcctaacataccatgactctatccaactgagttgtgttcatactgcaaaaatactacatgagcgagagcctaccactgctcctcgccagacctcctcctcgagctcctgcctcctcccgttcaagtggttgtgacgatcgcggtcatctagacggggatgaggttgatgggccttcttgatgatgcattttgaggagtacggtccaggtctcgactagggtggggaccgtgggcgtcctcggcaacttcgttctccgttactctgtcatcggtatgttgtcggggatctcgagcaggaccttgcggggttggttcggctgcggtcaagaaagcagagttgaggttggctattgtcgactatatatgtctgacctagttgtccgcctccgggaaggttactgggtcgaacggagtttacctcagtagagagttgaccacgcacggtgaagtgtttggcaggagttcgaaccggctcgactggttcacgtggtggaacaggagctcgcggttcatctccaaaacgaatctcgccctcttcgtgtatgtcctcgacgactctttcgatcacattcacttcgcatggggagttggatcctgaagattcctggtcatctaagttgtgaa

SEQ ID NO: 51100 - DNA, 1099 bp, Oryza sativa
ttcctgcagccctggccaagtggaggaaggtaggaggcagtggactgggctagggctaaaaagtaaaaagaatgagctttcggcccaaaaccaaggatgaattttgattaactttttcaattataatgtatgtagggatcccaatattacaggaagaaaaccctttacctatcgattttgctatatatttgtcgacaaatttttccccaaaaatttgacagatgtaattacagtataatcgtagtgtaattacactgtaacttgcatgtaattatactgtaactatagtataacttgtatgtaactttcaaaaatctctccgtaacatgttatttcggtaaaatggaggtcgtgggaacaaattatttcacatatgtgtgtgctatgatttattttcttcctcaccaaaacaaatcttgtaatagatctaacgattcaaaattatgtgtagttacatgcaagttacagtgtaattacatataagttacagtgtaattacactataattgtactataattatatctgttaaatttttggggaaaaatttgtcgacaaatgtatatgtagtctcatgcgagtacttttctaagattaaactggtaatagctaaaaagttaagattaatttcatttattcaacacaagaaaggaaaaaaaacgtgtagaagccatcgtctctctcttccctagcaacaacaactcattcctcgcttgctggctgctgctccgtcgcctttcccatctccaaccaccactccactccacctcctcctcctccgccgctgccgccgcgcagatccgcgggcaaggggctacggtgcggcggcgccgccctgcacccccacgccgccctccgcaccgcgcgcgcatccagcagtcggaagagttggaggaggaggggatgaaggatgtggtggggagcccggggacatggagcgggatgtcgctgcgggtgtcgcaatgcgtcttcgccggcgcctccgtcgtcgccatggcctccgcctacggcttctccaactacaccgccttctggtaccctactactaccgcctttccacgtctctctctctagcctcctctttccccctggggctgcagg

SEQ ID NO: 51101 - DNA, 578 bp, Oryza sativa
ggtacgtagtggtagctagggaagaaaggcagctccatcctcccttaagagtagcacaatgataggatataagtttgcttatgttgttgtttttttattttttttgcaaactagaaagggagcctacgcagatgcgtgggcaccttatttattatttatagaaataatgttaatataattaagtcatatctcactgtatgcatataataagttatagatttcaccttataattgaaaaaaaatctttgtcatgaaatagaccgtagactttaataaacaataagaatgtttcttatattcaagcaaaaatcacattttcttaacggattctatgtattcacacgaagtatataatctttttaaattgatcaaatctaacggtctaagataacgggtgcaccaacttaaatgaaaatcgacggtgagattataacatgttacgtagcaacctagaagtgcttgtaggagtgtcacatggcagcttacgagtgtttataggaaaattaatgaacttttagtatataatagatatgtaagagggggaaaagaggataaataagaggcttatttttttattt

SEQ ID NO: 51102 - DNA, 508 bp, Oryza sativa
taccacccaggactaaagatccctctttttagtcccggtttttgttaccaattgggattaaagatggattttagtcccggttatttcaaccgggacatctttagtcccagattcctactcccagttggaaacccgggactaaagggggttaccaaccgggagtaaaaaagatttcttcgccagtgtgctaaagatgagcatcttagtcccggatttctactcccggttggaaacccgggactaaagggggttaccaaccaggagtaaaaaagatttcttcaccagtatgctaaagatgggcatctttagtcccggattcctactcccggttggaaccctggactaaagggggttaccaacccggagtaaaaaagttttctccaccaaccgggactagatggcatatgtgctaagttcatagtattgcaaatttgcgcgtgtgtgtaagtaatggcaacatggacttcatgaactcgattgcatgttaattcatttgtttgcacagttg

SEQ ID NO: 51103 - DNA, 568 bp, Oryza sativa
cgcagccaaatgacgctcttgcccttagccatgtttcatctagccaaatggcgctgcggcatcatcatcagcatccgccggcgccgcctgagctgcagctcctcccggcatccaccacggcgccgttggccgccgcgtttttgtccaactccaccggttcctcctcccacgagcaacacgtgacgacgctgcgacgacgacggggcggcgccgcgacgacgacgacggggcggcgctgcgcgacgacgacgacggggtggtgctgcgcgacgacgacaacagcggcggcgctgcgacgatggcggcgacggcggcgttgcgatgacgacgatgatgggagcagcgctgcgacgacgatgacgaggcgttcctccgcatgccccctcctcctcctctccgcctcgacctcgccgctgtccttccgccgcgggcccagctccgcgtctctcagcgccgcgagcgccgccgccgcctcgtcgaatgcctccttccctccgcctacgccgccggccatcacggccgtcgcctcctcgggcgccgccgccacgggggtcgacttggccatggg

SEQ ID NO: 51104 - DNA, 754 bp, Oryza sativa
caataaaattaaaaaataaaaaggtctaaaaaataaaaaaaaatccagagggtggggaaggttgatgataaccagtgggaagcttggaaatgtggaggcaagggaaggataggtgtgctagtgcaagttcagtgtggtggatatctgggcagttttcttgtgtcagacaagcattattgaatagtttgattgcagaataaatttatctactcaaacggaaacataccaagaaaacatacacgacaagacagtacagtttagctgaacaactatcgaagagcaacttaggcaagaacactcaccatgctgagtttgtataccagcaggcacacaccagctcatggggaatgcaactactgtacctctatccattgatatttcctgctcatttcagttactacatgcaaactaatccaaacttgtaccatttatgtacaccctatttgcagcaataaccaaaactaaggaagctgagtgagaccatgtactataaggccacttataaaggaagaagagcagaagcaggtttttattttggaagaatagaagcaattaacaaatttaacacagaagcctaccgagtgaaagtcctaaactagaatgtttgctgcaaattagcttcagcaatcggctcatacagagacgtaggtgtccaatgttatttcaagcattccaaaatagcgacttgagcttgaagcatttgcccaagaacccttgaaattgcacatttacgcaataggcgcgcgctggttga

SEQ ID NO: 51105 - DNA, 983 bp, Oryza sativa
ttcctgcagccccaagcaatccccttgatcggtaagctatgtctgtctttgccaggttttttttttcttttgagctaaagagagaatttatattaatgactgatgactgactagggggttacactcctgacttgacaagtcaacgatccttattgccagttaagcaagcctattttttactatggccatgtttagttccaaagtttttcttcaaacttccaacttttccatcatatcaaaactttcctatacacgtaaacttccaacttttccatcacatcgtccaatttcaactaaacttttaattttagtgtgtactaaatacagcctatgtctttttcttgtgcacctgcacactctgcaagcactacactctgcaagtactttagaaatcagcattatccatgaggatccttatggactccttatcaagttaaaacaaccactaaaactagcacagtttttatggcacttttaacgttgcctataatactttgctatatagacatttttaggcatattttgttaaatctatcttgtagaggtatatttttggtacttcaaaatttttctcatatgtaaagtcattttctcaagacatctaaacctcggttgagtcactttctaaatattaatatgtgcatatatagaattaacacaacacatacatttacaagtaatgatataaggttcagataattagtgcattgaagataaaaataatatactcacgagtttaaggattggtaatacttcctccgtttcacaatgtaagtcattctagcattttccacattcatattgttgttaatgaatctagatagatatatatatttagattcattaacatcaatatgaatatgagaaatgctagaatgacttacattgtgaaacggagggagtagcaaggaaatatatttttttctattttcacattgctttgctataggtatggcaaaatttaatgcctgtgggctgcagga

SEQ ID NO: 51106 - DNA, 689 bp, Oryza sativa
ccatgttatatattttgatactactagttgaattactttgctattactgaagagctgttctgaacttaatttggtacccttcccttgagtacttttggttagaaatatttcaaattcaattaaccatatcatttactttgatgcaggccaaaatatccatcaaattttgatgcactactaaaaaactatatcagccttctaagaggttcacttttgaacttagtttagatcttagctatgcatctatgttatttatccttttttttttctgatggaaattttacttatagatctttccagaaagatcatgcaaggtatagccttggcattgggtgggccagttgatgcttttgaaggtagaaccgcaggagatcctttttgggtttgcaggttgattggttatcctgtatcaaccgatattctagaagagcatcgcactgacactggctggtaagcaaaatgtatctatgtatttatttggtagtatattgtgctagaatgtacttactagattcatctgacaccgtttttctcttatgtcacatccgttctgcgatcaattcagtggagctcacacagactatggttagtacttagtacatatctttcagaagttcctttcgaaatagacttttatatatggacaacacatacataaggtgctttgatgcattgtaaaaagtttcacg

SEQ ID NO: 51107 - DNA, 664 bp, Oryza sativa
caatcctattggtaccggactatctaggaggcactgctaaatagttctatagctatcggatagtttgttcctttatggggcaacaagtggttcagtgactgttggaaaagcataaaggactagataatccggccctatacaaattctagcaaactttttcaccgggaagaaacaactagttggaggagttagggctataaattggggtgctatggactcaattcaagacattaaaccccatttcacatgatgaatccatcgaagtgttcaagagaattgtgtgcttattgaagatcatttgtcttagagtgttcgctaaattctctcccaactctctccatttctatgatcttgagtttgtgagctaatagtgggttgagttgagagtgtgtggaagaaaagatttgtaatctcagagccgccaacgcgtgtggtttgcttaggaacccttgtgaaggctctatttcgcctttgaaagggaagaagtcactgagtggaagccgagcttcatctaggtagttgcttgccagaacgagcttcaccggagggtagttgcatgctatccgagcttgagaccgagtgggtctcttgaagcacgaacttttccttggccgttgcttgaaaaaaccaagacaccatcggaaggttcttggagaggaaaagg

SEQ ID NO: 51108 - DNA, 627 bp, Oryza sativa
agtagttattagattgcgtagacgcggtgtctgggtaagaatttctagtggttgctgcgtatcccacagttcgattgaggtaggtgtagaggtggtgacagccctcaagagcacttaagtcctctctgtccaggtacatactatagcgacatctgggaatagcggattgccagtgcctgaagtattacgttaagattaaagttaagctttccctagacattgtttctcaccagtaaatcctctctatcctggcctatcatttccttggtgtccttgaatgaaccagaggaagatctgatcacacacgttcccttggattcgatacccttggaatactccgtaggggaagtgctatatcggtatatccgtgcgcttgcggattttatctgtgatcggtaagaaataccaacagcagcaaaggtggaggaggatacgctgctcccgctgacacgcagtggcacagcttggggggctccccacgacaaggggaattgggggatggctatttctagatatttttccccacaacacccctgaagtcatactagtcacattgggcctgtttggttgctaccctgagcaacctgcctgagtattttccatccctgagggctgcctgagcttgct

SEQ ID NO: 51109 - DNA, 754 bp, Oryza sativa
tcaccttgctgcagaaaatcgtggcaaagaattgggggggctttggcaatctgacgcgcacagaggaaaggagagagttagaaattttgattcccttcagatctggacaaagtactcttctttttctacttacctgctagctctcacggtcagagctacgctctaacagatcaccaaatgcaggacttttactggaaaaagaaacaactggccaccagatctgcaagttccttggtcaccgctgctggagccatggaagaatcgatgggaactggtctccgcaagaaccctaggctagcagtgaggaggaggaagaagtggtctcgttttcactactgtatagaagagcggtgattttactcaggcaggtggagcgaaatgctcaggccacccattttgtacgcctgactcaggcgagtacactcaggcaagatttatcaggctagaatcctcagggtagcaaccaaacagatgccaggcgagttacaggcatgaccttaggccaggcttattatgccaacgaatcgttggatcactagtacaacccactactatagcatagtacggtgaaccataaaggaactctatctttagtgttaagatagcccctaaaatgtagcaaattatagaaatgcaacaagtgctacaataaaatttcacaaacagtattattgataaatgatgtgatatgatcttggagtgcatacacgtttgttttttttgttccgcaaatttatttgatgaagggctgcag

SEQ ID NO: 51110 - DNA, 696 bp, Oryza sativa
aacggctaggttatgatggccacctaaaaggatattaggccgtaggcgacaaaaagcaatctagtccactagcaatggttgtgcgcatgggcggatttaccatacaaggtgtgggggccctggaccccactcaaaaattactggcgccaggtatatcactaattgtatgacatatggcccccagtccaacagataggaggaccccatttttgttacttgcattgaatccatgcgggcgttgaggacttgaggcgtcgaacgtccactaccatcctcttgttaatcccgcaaattagctcttcaaattaggaataggggaacggaaagcaagcccactgtcatttcgtccgctacgctccggcccaagcctcccggcgacgggcctccgctttactacggtagaagctagcatttattaagtgcaaatgaatttgtatcacaactcaacagattatcttcaagatttgtgctagtatttgcttttatacttggagattaaactatatcactagtggataaattattcatactaattacatcgtacttacactataattacatactgattacatatgtaaatttatttgggacttacatatgtaattttgcgacttatgtatataaatatgagagctacattataaatacactaaaattaaatatgtaatttaggaacttacaatataaatacatacc

SEQ ID NO: 51111 - DNA, 516 bp, Oryza sativa
ttgaacattgccgaaccgttgacaagtttcacatcctctataatatttgaagcaatcatcaatcatcctcggccaatagaaccccgctctcctaagcaaccaattcatcttgtgggccgattgatgagtcccacaaattccttcatgtacctctcccatagccactttagattgatcttcatctaagcacttcaacaagacaccatctatatttcggcgatataaatcttcatcaagcaatgtgtacttgaatgcttgccgtcgaattttccgatcaaccttaagcgtgggatctttcaaatatcgaatcaaaggaatcctccaatcttcttctgtttcttgggcacaaatgtccgaattcacaattaattcggccttaaaattgattgaaacgtgccctccagcgctctgcctagaaccggtcagaccggccataccaggtgtcacaccctgaagttctcctcctaagcctaaaattgaatttataaaccagcctaagaaaatgccggtgcaaat

SEQ ID NO: 51112 - DNA, 692 bp, Oryza sativa
tagtcccggttggtgtactaaccgggactaaagatcaaatatgcccgttaccctttttaaccggaactaaagatcatctttagccctggtttttattgcatccgggactattgtggaattcgaccgaccgacgaaagatggtttctccaccggtgtttcaaccgttgcggatggcataccctaagctagtccaaaagtacatagtatatatagctgaagatgaaagtccctggctagttgcttgtatatatgctgaagtaagaagtgaactgtcggtttgccctccaaataaatctagctagcacacctcgagattcccaattaagtcaatcagtaataataaataattatgaacccctaattaagaccaataagaaaaaccaaacacaggaggaaggaacggagcaattaaatataagagtgaaagcgacagggcaccggagcgtggcagttgcgtaaattactccaaccctttctctccatgcatctcacctccacagcgacccaccacccttctttctgccatgccttacatttacatacatacccctcctctcaggctctcactcgcgctgcatgccacactgcttcttcttcttctctctctctagctagctagctagcttctctgtaggctgtagctgcggtggcaatggcggcggcaaggttgtgggtggttgcagtggcggtgg

SEQ ID NO: 51113 - DNA, 734 bp, Oryza sativa
tatcaagctcactccctatttttcccatacctaattgcatgattgatttgtgggcccttgcatacgcacttatcagtcatcactcatcatgaacacaaatcacagaggatccatcatccacgattaggttccccatccttctctggaaaaaaaaatatgatactcattaattaattgagccatcctggacagatcatattatttgtcaatggagactcaacgtctattttgtcatatggacagatcatatttcacaattacaagaataccatcttagtctgaacacaaaaatgcatgccctcagtattatttgctttcggatttcggtgttgatgaagttcaaagataattaatccaattttctactactctttaatttgtgcttttgaaccaattaatgaagtttacagccagtgtttacaaattttgttattttcatgctccacgtgatccgtccatttgtaatacaattaaataataatcacgatgattaattaaataataaccacgatgatgaattaattgaaatgaatgaaaataaaattgcatgcaggcgacggggtcggcgccggggacgacggggtacgtgaacatcacgtcgcacaagggcgggaagatcgacttcatctcggaggacgcggacgagagcgcgaagccgtcgaggtacgtgaagtcggtgaaggagatcccctacgacatctccgtgctccaggtgagctccggggctgcaggaa

SEQ ID NO: 51114 - DNA, 674 bp, Oryza sativa
tattcaaaatatcctaattaatagatacaattgcctttctgagagcttttctccatcgtggcaatccttgcgaagcacgttgatcgattctagaagcagttttacaactgtcttcatcagaatcggctaataagctgtgtcggctgtcctctgtccgatccatctcagccgatgccatcgcagctgatgcatactctgttctttgaatctaactctttgccgaatccactctgagtccaatgccaaacctagttcatatcttaccaaatttggtcgttaacactaatatggatacaaccattgctcacatcatgaatcaacaataatacatcaagatcaagtccttcaagtgctggaatccgattcagccaccttctacattgttgacttcaaacggccgccaaatctacatacgagctctgtttttggcccatgagtatttggtggaatgctcttggagccctctttccaaccgatctagcctcatctccatattccttctctgacagttgtaatcacagaaacaagatgtagtgtcacctatattgggccaatgggcttgaaattttgtttgggaccccagcccaagtggggcccatgtgaggtacgccccaactaggtggagcacaaacctagggacccctagttcattctcctacctccttaaatagcta

SEQ ID NO: 51115 - DNA, 611 bp, Oryza sativa
tggacaccatatcggttagaaacagagattcatattgatcaagttgatgaggtcgatggccgatacagccgatacgtacggtttaacttgggctcggtataggcctagattggaatgattgtcattgccaattaaagatagagctcgattaaggcaattgtatctattaattaggatatttaagtcggttttcgttagatttggtaagaggccaccatatatggtcttgtttgtattttatctttagaaaggtttgagtcatgtccataatggactaagtctgtacttggggtataaatatgaaccccgtacaactataatacgagagacaatccaatacaacttcagcacatcgctaccctttttgttcttattttcggcgagttttctcaacaagaggtaacccgtctcaatggcttgtgctatcggggctattatgtcattttagatgttctagttcttttatcatgaccatctattatcatatgtcttcgttaatctagccttagtatctcaatttagcctatcggctggttctcgctttagggttcctgccggtatcgtctaaattgccttactagattagcttagctaaggcatcgggctgcagg

SEQ ID NO: 51116 - DNA, 600 bp, Oryza sativa
ttcctgcagcccggtgcgacaggcccaaccatccacctatactatccaatttcaatagactaaactagggtgagactaatcacggtgaatctggttgaccgcccataaccgcgggcatggctattcgaatagttttactctgattagaggtgtacaactgtacccacaagacatagccccacgacacatttccgtgtgccgacatgccaccacgacataccggaaagaggccgtgacaggacccttcgcataaccccctataaccaagcacaccacacctcaggtttcacccccagtcctcgcaaggtagcgggcagtccctctcgtgcctaggtgaatccggaagcgacagaggccgtcgcagggcccgccccgctccatcacgcccacccttgcctggatgcgtcagctagaggaaagctacactacaagcccagccgttgcccaggctggcttgtggtaagtacgataagttcttccagggcatcccgcgaaccggtccttaactgccaagggtgcgatcagcaaaaccatgcacccacagcccaccatgtgattcattttaattaaccaacaccaaagcggtggtactaaaccaac

SEQ ID NO: 51117 - DNA, 1656 bp, Oryza sativa
attcctgcagcccgaatcttgcgatcctactctccgttgaggagctccaaagagctgggtctcaattaaccccttgcctcacttgtgcaaaaacccctgaggaaatccacagccttcaaccccaaacacccctaggcaaatttctagaattgagtgaccaccaagatccaactcaacctacttctagaaatccaccacaagtgtgggttgctctacttggaaagcctctagaatctcagcacaagaacttcaccaacttacctcgttccctttcggaggagaggaaatccttcacaaacttacccgggacatccacaatatgcaacggattctcgcgggcgacacctaaccatctaggagatcatctccaagagtaataagcaccgagatgacagcccacgagatattccaagtgctcacccaagatcctagtcttcacacatctccaaatcttcttctctccctctcaatctctctttctcacaagaattaggctctagattgagtggagaagacaagaaacacttgggagaggctagcaatagctctaggtttgaaaaatgaaagtggaatggccaaggaacgagctggaatcgagctgtatatgtatgacggctaggtaacgtcatctagccgttactcacaaatttgaactggaaactagacaggaagttccggacctgaaagaccggaacttccggactacacttaggaaaatctttttcacaagaccggaacttccggacctggaagacaggaagttccggacttgcatttttggacagatggagtatttgcaaaaatgactcctagggaaacttgacacttggttcacactaagagcacttgatatatctcagagcatcacctggaacccctcttaatagtatagtttttcctaaaaactcgatttcaaaagataaactatcctatgcccttctcgagttccggtccgctttgattttgtacttttttgggggtctccaagcatccatcttccacaccttagactaatgcacctgaaagtcactcaatgaactcattagtcccttaaccacatttgtcattaatcaccaaaacccactagggggattaatgcactttcacctacatcccgaagaagctcctcctggcccgcgtggcgtccatctcgatccactccccctctccccacgtaggacatgggcttgataggcggcggcgttgggcgggagccagagccggtgttagaggagaagcggaggagcgagaggagacgatgcggctgggggtggtggcggctagagtgggagaggaggaggcggaggtgagccatgcgatggcggggcgtggcggcggctggctttgggcaggccggcgccgccagccgacggggcgaggccgagcggcggggagttggcggcagcagtgtcgacgtggcctgctcgccggagcgctgcttcgccctcgcgtccctccgcgtcggcgtgcaacgagctgcacgaggatgcgaggaggtcggcgatggcgaactccctgggcgcatcgcggcggtggagggcggcgaccacatctgtcgcgccgtggcggcgctcatccgaccgtccttccaccaccagcgccgccgcgctgccttccgccctcacccaagccacctctccgccatgtccgtcgccg

SEQ ID NO: 51118 - DNA, 1374 bp, Oryza sativa
gtcaaaacatcttatacggagggagcaacaaagatgcatgtgcgttacaacaggtaaagacaatttcacgattgataaaaactctaccaatttaaacgacaaaccgaaacaagacaaacaaaaccatggcaaaacaaagtcagaaatcatatataagtattgagcacactagcttcatgcatcatcatatgaaggatccttcatgtacactttcccatagcctcacaaattgatcgggtggctattctattatttgacacgtgtattttgctatacctcattgaccgaagattgtaattttgattattcaattagtgaaattattttactgtaaatggaaagtatttgcaaagtaataaacttgccgcatacacaccttaaacaattataatttcaaaagaaaaatatttatgagaagagaaattcggaagagaaaagaaaaatgagaaaatagacgagattgaaaggatcggaagagaattaggatgattgggagaaaaaagaaaaatggaaagagaaaaagatgccgatcgagggaggggctagtgcggcgccaagtgggggtgaggatgaggatgaggtgacgagatggtgtggactggttaggttgggctggtataatatttattctagactcacctcgaatcagaaatgtcgaccaataatcaaatcaaatacggaaaatgtatggaaatttcggacggaaatgtttttatttttttataacttagggataaggaaagaaacagagacgtagtagggattaggcgattgaacagtagtgaaaaaaaaaagaaaagaggaaatatctgctggccaaaatcattgtgtcctcgcctgagggtgtccccatcccatcccgtcggctgggcgtggaggtggagtcccgtgtcgcgagttcggccgccgctgccctgcgccgatctccatccccgtcggttgtcctgctgcttccgccgcatcctggtgagtatccatcctctttctcgttcatctctacccacccacttttttccttgaatttccctgcgttaattctagcttctcttccagatctggaagcttcttttctctcaattttgatcaccttacaaataacagtttgtttgttcccccaaaaaaatttacatcacagtataccatgtcccacgttagatccgtccatgggtagatgatgttgctatgttctccgatttgtgtgcaatagcgtataaaattcccttcaatgttccttcatccatgcgcaggaagaaattaaccgaaccattttagtgagatattgcgtagtttcgatgaagtttttgctgtactgtgcggggatttgtttgcagtgctatttgggttgcgcgaaccaacagcttccgggctgcagga

SEQ ID NO: 51119 - DNA, 1191 bp, Oryza sativa
aagtaatcaatattgcgacattgctgtttagatgatttatatggaaaatctgaaggctgctacttatgttttagtggctgcacatcttaaacccactatctaggggagtatctgtattgttcttactggcaacaaaattcgagcagcttctaacgctgcgttcgaattatggactttcctctcacgcacgaaaaacgagggtggtttattagcgcataattaattaagtattagctaaaaatgaaaattagattaatatgatttttaaagcaatcttcctatatattttttttgaaaaaaaaaacataaagtttagcagtttgaaaagcatgcgtgcggaaacgaggtagtataagttgggaagggggaagaaagaacaccctaaggctgtgtttgatacttggggttgggaacccaactccaccgcacggaaaacggagcggtccattagcgtgtgattaattaagtattagttaatttttttttcaaaaatggattaatttgtttttttaaagcaactttcgtatagaaactttttgcaaaaaaacacaccatttagcagtttgaaaagcgtgcacgcggaaaacgagggaaaggggttgggaaacttgtggaaagaacgcagcctaagcatgctagtgcatggtctaaccagctcaattcaggactcaggagatcttaatgtcacaggatgttagttactaacttccgaataatatatgtaattgcatatagtatatattggattatagcaagctaatacgactttattcaatccctttttggttgaatttgtcctcccgtttgattatttactgggatgtgctgttgtgcatctcttttagaaaaaaaaatacacatatatgagtattatggttaatgttatgtagtggcaaaatgcattagaccttaaaagatgaatcaatcaagagttggcaccgacatggttttgaaatatataaccgtggaattgaacgattcaacttttatgctggcgctgatttacacatctatcaatttgcctaagattttaaactttctcaaagagttgtacagaagcaaggccctagttcgtgatatgttgttacagcttgtatagctccagcaattaagcaatctaaaattattataatcacatacatgaatgatgatttttgtatggtttgaacaagcatattgcttattgtttag

SEQ ID NO: 51120 - DNA, 704 bp, Oryza sativa
ccactgcaaagctttggatgggaacatgtatcctgtggttttctaacatgtgatttgttttcagtaaaattggtctaaactattttgtatttgttttctgctttccagttggtttccccgtctttaccctcatccattttaaaaattacaaatacaaaaagtttatatatgtttaaatttgtcgacattattttgacatccagaccctatggtgatgcaactaatgtttggttccaaatttcccatagcataaacgttgtactttgtagtcgtaagattcactttgatgttagattgtgagttgtgactagtagatggctgtgttctttcgagggtgttgggaacccttctctcctagcacacaaaatgaagcggcggattaacacataattaattaaatattagcttaaaaaaattgaaatagattaatatgatttttttaaaataaattttctctatttaaaaaaatatattatttattagtttggaaaggaaagcgagagagtagaagctaggaaagtgtcccaaagaatacagtccagatcaacatggccttgaactatcaccgaagtttgtgtttcactcttaattggataaaaatcaccatcaactaaatatttttgtatattaatattttgcctagttgacatggatacgagcttgctattagcgactatgtccgaactacaccgggctgcaggaat

SEQ ID NO: 51121 - DNA, 860 bp, Oryza sativa
gaatcaacaaggttggagtgcaatggttaaatgaaacagtagcagaatcaaggttattggctggctggacagagaccggaagttccaggccaagaacaccggaacttccggcctgcaaaactgaagaacagaggatttaaccaggccagtgcatgtgacaaaatcctatagatcggcaatctacaaggtagcaggaacaattctatccaaaaggttttctccctaggttcacatatttagagatcggggcaaaaacatgatgaaccaaaggagaagatcaaaagtgctaccttgagagggaaaatcgcaaatcgatcgcgggatgaacctcctagccaccaatgtggttgattctacggagaggaatcaaatttccacggttggaatagaaaatcgccgagaggagcactgtagcggcggctagggtttgggaatcggggaggagaagaagtgacgagagagaaaagaagcttgggctccccctgggtagttatacccccgacccccggaagttccggactgggatgaccagaacatccggcctgacagaacagaggacagtcaggcccaagttcaaaggaatagatgagaattaaatgatttagaaatgaaaacctatggacataaagagacttatgatgtatatgaccagccaacaatcaacattacataataatggtcaatatacatcacaagaagggataactaccaaattttcgcaataaaaacacacacgaaaattttccgcaaaatttcacataagggtttttggataatagagtgaatgtttgagcttattcctggtatcaagaccatcttctacacaagaagtgatctcaagacgccaaagctcttttttt

SEQ ID NO: 51122 - DNA, 684 bp, Oryza sativa
atcatcccacataattcacatgaggttcaaatatatttttccatcattttttgtaatatcctatatacctatatagttaatgctattttttgtcttattaggccatatcatctcaattgtttttaaccttagataattaatctatggtctaaattacctacctccttttttttctctcataaagccacatcacattacttttatactatttaaattatcacatactatctcaacttatgtaagtttatgtcgtctaattattttacacattatttttgcttattgctatcatactaaactctcgcaataactcacagggtttcacttagtaagttcactatgagtgtatttggttgctcacgtctctctagcctagctcatctctctcgtcgagactgagtttgacctagttaagggcatacacatgtagttgtttggttgattgcatcggtttaacttggctagcatgagagtttgttagtttgtttggttgcttgcatgatagatataaaatgaaagagattttgtttgactggtgatatatatgaatttgagtgcagttacctcctcatttggttgggtgaggttacctctcacgtgaaaatatagaatttaaccggctagtgccgagtagataaacaatttatcacatgaaataataataataatattggagcttaaaat

SEQ ID NO: 51123 - DNA, 578 bp, Oryza sativa
ccacctgactgatctaagaaagctcgccatctacaagctcaacgtctgaagaggagataaaccttttgagaatctatatcctccatcgagtacctctgtggctactctctgcacaccctcgtaatcgaggacgtctcatcggagactctggaatcactaggtgatctttcttcccctcccaagtttctcaagtcccttgagctgtctggcaagtgggttgagctccccagatggatcacacagattgaagaactcacaaagttgactctctcggtgacagttctgaggacagataacttgagaagtatcagccaattgaaaaaactgttctctctcaccttttgcctttcaggcgcaaagcctgatccactgtcaacagccattcttgaggagaacaagaactactctgatggggaaatcttagttccagcatgaggatttgagaatatgaagctccttcatttctctgatcctctactgcccttgctgaactttcaggagaaggctatgccaagccttgagagacttgagctacggatcaggattctcgagggactttttggcatacaaaacctgca

SEQ ID NO: 51124 - DNA, 902 bp, Oryza sativa
aattgtcccatttggtcgaaaagaaactctccccttgatcctgtctacaagttgctttgcaacaactcaagtagatgagacaaattttagttgattaataactatcctcccgcgcgacctaccatgataccgacacacaaacttcttccaataggcagtttccaactatttctcgtttattagtttcttttcattttccatatccatcaaccatcagctcaactcatgtctcatatctttggttcccacagctgtccaaaatctctagcccacaccgtgttctgttgggaagcctcaactatgatgtcattcgacatcccagttcacataggactgtttcagaccatgtaatggtcatccagtagacatcatgaccgattttggtaacgatttccaatcccacaaaatgtttgtcacaacactttgcaagcaaacctatgctagaggaatcaccttccattcgcccataaccatatgcatggttgttcgaacagtttggtaacctttgcagagggtgtgcactttactcacaagatgtgatcttaccttatcactggccaagtagggggttcgcgacaaggcctttccaaagctaaccgaggatacatcatgccacacaaaagggttctctctgaatcgagtatcagacaaatctcgaccatcttctatctaggaatctaggatgtcaccaatcaaccgtgcccaacatgttaaaatttagggaaattttgctacaggacacttgttatgtgtggttttagccctagaacactgcccaaacccacttttgggggaaaacactccataaacgtggtaatttgccagtggacaccgcgctgattaaaataatactttccggttgggaaggagaaagaaatcgcgtgaaatgtcaaaaatgccct

SEQ ID NO: 51125 - DNA, 597 bp, Oryza sativa
acaaattgtgatttgcaaacacgctgacaccaccaatcgagttttcaaaggtttataaacccattttcctatatcaacaagcaagtgtgaagtgtgtggtattgtcgacacctatgctcggggcatggttgccgaggtaccattagggggagcgacaaaggataaccctaatcaacatcctataggtatagtgcaactattaggtaggtttgttagtttgtttcgtgaactagggcccagtcatatttatcatgcacactaggaatgcatttttttatttttttttaaaaattataggttaggagcaatatgatcaaataatgacttgcctctgtcttcattttcaaaatctttgaacttgcttgttttagactaattttcgtcgacgtggactacacaggaaacaaataaaaccaagcaaaactaaacataaaataccattattaataactaatcatgccattatcaatatctcatttttaaaaaaattagagacttgaacgaggttgatcggagttaccaatagggagatatgaagtttgaaagattacaaggtttttctagaattagaaacaaaattaaaggttttctgtgaaa

SEQ ID NO: 51126 - DNA, 515 bp, Oryza sativa
aatcttgtcatgtgttctatatggtctctttttcaatagtctttattttttattacgaatttcagttacttataaattgtattccttgttaaacttttattttttttctaatttctgaatttattttattttttaatttaaattttaattaatctcgtattgtgttctatatggactattatttcaatattccttattttttattctcaattttagttgtttcaaaatcgtattcctagttgaactctattttttattattctaaaaattttgtaattaactttatttttatttagaattttaattaatcttgtatcgggttcttacatggactcttcttctaatattgcttatttttaatttcaaatttcagttatttctatattgtattcctatttgaactatccttctcttttctaatttcagaatttattttatttttaatttcgggttttaattaatatcatatttgttctatatggacccttatttagatattagttatttttaattcc

SEQ ID NO: 51127 - DNA, 900 bp, Oryza sativa
ccgttgatcccaggttttggcatggatgctccagatcactccctgatggcggttggagggcactttggacatttccccttcgccaaccgtcatacctaccgctatataaagacatcactccctcacttcacttacacacttccaagcttgagctgaattataagaggctctattgtactatattgtatactagaataggaagagagtagagtagaagaagtcggaagaattccggagttgtcagtaatcttctcctatttcttttattctggttattactctgaattcaatataatattattcctaagtaatttagatttatcttgtgagaattatctcttggttagttcctaaatagcatacgggattattgttcactataatcaactaaaatatagtgattgctttagtgagttataaacactaaagtagatattaattgcttagacgtagtgtttaggtaattgttatacagtaattgttgaaacttctttttgagctgtctgctcctcggggcgaattctatgagccacctccttcaagagagagcaaagcaatggtacacctctactgttggatgtgtaagctgtagttgggagaagttgcgagacagattctgtctttccttcttcccagttactcgtattactgcccttcgagtagaaattctcagtttcaatcggggcagcctgtccagattcactaatttagtgcagtccggaccaaccctatccttacccgaatatgtgctactgcaacatttccatataggtttggataaggagtctgcattctatctggacataaccgtcggaggatcgttgatgcacaaaacgccgtcggaaggaagaacaattttggatcatattctagaaaatacttccttcatgacgcaatctg

SEQ ID NO: 51128 - DNA, 2708 bp, Oryza sativa
ctaagcagccgtccgtcgagaatgaagaaattcagactccggatcgtgccgcaattctgttcagggacgattttaacgaagactatggcaataccctgaactattttagcaagaagaaatcacttgttcctttgccacctcccgatcctatggaattgggcttcctaagggaaactgttcagagttaacatccataatgagtgacgaatggctaagggaggcagagcttttatccgaagtaattcggatatgccatctggaagggaacgacgtcagtattctctacagtccaactatcggggccaatctcgtctccgagtcttttgcattagcttatttatggcaattgtatttattaattaggattttaatgttggtttaaattaaagacatggtatgagtcctccatgtggtcttgtttgttgtttttatctttaggaaagtttgagtcatgtccataatagacaagttttgtactctaggtataaatataaacccaagatcattataaaacaggacgaacttccaataaatacaactttcggcgcatcgccacctttttctttaagtttttgacaagtttttgcttcgagtcggggcatcggttgtgatctctcgacaagaggtaacttgtctcgatggtttgcattaatggggctattgcgtcgctttagatgtaatggtctcatttttctagctatcgtttatcatatatcttacttaatctagtctagtatctcgatttagtatcggctgagactcgctttaggtttatactggtattggctaaattacctcgctagattagattagctaaggtatctaccatcctgaaaattagttaattacttgattgtttagactttaggtttctttacatactttgagatgcatcaaccctagtcttgtctagaaccctaaaaactaacctgtaattaatcataattagggatagtatcagagtttcagctgatcttatctaatatataatattgcatgctagagtaaattaactggtgctacatggagtatgggctccaacaatatccaccgtatatgtgctttgagatttgtgctgctcaaaccggagtattagacatattaacgggtaaacccgattagatctttccatttttagagtacccgcatgatttgcatgcgtgcatgtattgcaggacgtgattgcctttccatataaacgtactcacatcgtttccatataagcaaacatgtacgtaataatttccttccgattgcatgataatttatttccatatatgatgcatactttcctttttttttttgcacatgctcacatcgtttccctatgattgtgtgaatttatttccatatctgagatgacactgaatcaaatccacaaattttgagtaattccactaattaggttgtaattgatttatttccataaataccgattaatattttctactttttgtgtacatataaaatggtacgacatttcattttttacacactccactgtccagtccacgctattaccctgccggccggacgtcggcgagcttttcatcactgccggttgtctgcaaggtttcgttgccgttgtcagtcatccgttagcttcgtaaccacgccgttacgcgccgcgcgccggtcgttcgcaaggttcgttgtcgccgccgcaggtcgcccgtgaggaggttcatcgctactatcaccgacggtcgccacgcgtggttcgtgtgtaattcatttcaatttattcttgtattttgacaagtccctgttctaccgttttcgcagattgagtactgtaacaatttcatttcgttgtcaagaccttaagatgggaatgcatcctactaataagtttttggtttgtcttcctagtgagccaaagactgtacatacgtatgttgccctgggatcatgcggagaagatggtcgtgggcagaagaaacaccagttggatgcacgcgctaagagctagtgtattaacacaagtttttttaaactgatgttcttttcagtgtattaacatgaaatttgcacgttgtaatcatgcaaattaatacagaatattttggtactatgtatatacctaccatcctactatttcataaatatcagcaccaacttaatctacatcggtagaatatacatagcacacgaggcttatatacctacatctataaatagataggcatatacccaactagatttatatacttacatctacttacatctacatgtatctaattacatctggccaagctacctagctagagtataaaaaaacttaactaaaaggcctagctagcttcaaatttagttcaagaaaaaataagctacttgaaaattaaacttttttgacgcgcatttggataggtatataccaaactacaatctaaaaatgggtgtccaaaatatgcaatttttaatgggtatatacctagaatgtgtgtttagaccagtatatacccaaatagaatatggtatgtcacacatacccaatatacgtgtttaaatacctaaaaatgtgtatcctaaatagtattatacccaattaaatgtacatctcaaatgcattcatgtaaatacctagcttgtagtacgtttgaaacgtatgcacgtcacatacccaaaaagttagaaaacacaacacacgagacttatatacatacatctacatgtaccgaattacatctggtcagctacctagcgag

SEQ ID NO: 51129 - DNA, 716 bp, Oryza sativa
attgctccaatataattcgcatccctcaatcgtgataacaaatatattaaccctcaccccctaactattgaaacggatgtaatttaattcccttagcggctttgagagttgttttcgctaacatggcatgttgacggctgactcaagatgtggaacccatatgtcagtgtcacatttccttttcccttcccttttcttctctcactcttcctttcctctctgctaccatgacgacggcagcctcgagaggccggtcagtctagatagtggcatgtgcggcaaagaagctagcgccctgacggcgggcatggtcaaccatcctcatgccccctacccacgtcgacgtcaaacagtattagccagcatccccacctcctccctctctgccctggtgtaggcatcgagctcactccctgccttcctctctagtggtatggcggggacgtactagtcaaggaagtcgaataggagacggttgatggtgtcggcgctgtaggtggcgtcaatgagccatccgatcccaggttaggggagagcggtgttccaattgagggcaacgctttgggctcgagcttcggcgccaaccggctctagtgaggcccacgtgcatggagacggagtggatatggcggcacagacgctggaggaacaagcatggttggagaaagcagatctagtggcaggcaagatgctgaatctcgagtaggggtgaaaac

SEQ ID NO: 51130 - DNA, 712 bp, Oryza sativa
acaaggaattttatacaggttcaggcgcttcttattcaagaagtaatatcctactcctgtccggggatgattccgccgagtatgtaattgattgtatgattgggaaaaaagaatcgtcccgagaggaacacggacccctccttatatagggaaagggatctgtaatacaaagtacaatccatatcctaacagaatatgggattacagataaaatacaatcgtaactgactaggatcccgggtagtttcttgacatacaagtttagaatctaacccgagtcctcgtaaagatattctatctatatttggtaccgtatatccggctggaatataaccgccatgtagatatggggtaatcataatctccacattttctttgagttgcactcattttgagtgatttagtgtaataattgattgtaactagcttaagcaaagatcaagatggttttctatttcattatctaaaaaatttaaataaaaatatgataaaaaaattgccgtccgaatatgaggatcgacacatgtttgttgccttgcagcattgctgagacgaaagcatctttgatactccatatgtctagtatacaaatgcttccaagtacccaatctaacttttggtttggatcgttttggttggtatgggatatgatgggctgagattccatcttggattggagtggattggactcccaacaaatgtgggttggatt

SEQ ID NO: 51131 - DNA, 640 bp, Oryza sativa
tacctccacaagcccaccagaaatcctaatgggcgatcgtccccccgcacgatcagccctcctcacgtgggatcctttttttggggaccgcattactttcatattttagtaaattatgcacctaaagtttggtacacctcaagtttacacatctaaagtttatacatctaaagtttatacacctaaagtttatagacccaaagtttataagtcaaaagtttatatacccgattcaaatttgtatttgaattcaaatattttttatatatagtatttctagatataaagtttatacgtgcccaaagtttataagttaaaagtttatatacccaagtcaaatttaaatttgaattcaaatattttttatatatagtatttctagatataaagcttatacgtgcccaaagtttataagttaaaagtttatatacccaagtcaaatttgaatttgaattcaaatattttcatatattgtatttctatacataaagtttatacgtgcaaagtctatacacataaataagagtattagatttatttttattttttttctaacttgtgttttttatttttaaaatttatggtgtagtaggaagagaagaagggggaggaaggggagaggagcgtgttagcggaggga

SEQ ID NO: 51132 - DNA, 1383 bp, Oryza sativa
ctaatttatttgtgtactatttatcttgtattggcgtttatgagtttgtgtctgcttcatgtttgaaagagttttttttaagttttctatcgaaacaagatttcggcaataataaaagggggtggctatcaagctaggaaagtggatgggtttggagacaaggaattttatacaggttcaggccttcttattcaagaagtaataccctactcctgtccggggatgattccgccgagtatgttattgattgtatgattgggaaaaaagaatcgtcccgagaggaacccggacccctccttatataggggaagggatccataatacaaagtacaatccatatcctaacggaatatgggattacagataaaatacaatcgtaaccgactaggatcccgtgtagtttcttgacatacaagtttagaatctaacccgagtcctcataaagatattctatctatatttggtaccgtatatccggctggaatataaccgccatgtagatatggggtaaccataatctccatagtagcccccgagaccttcgcagttgaccaaaatagtcttctcaaaacaaaaaacaataatccgagtgcttcaattcaacttgctccggcttgccgagtgctaaaagactgtgaagggcgaaaataaaacatggtgcatcgagtagatgcacctaattaggtgtagcccccgactatgtgattagttgaaaaactaaacatatagttgagaaacaaaataataacacaattgtgcatcatatgacaaaagcatacacggcgcctagataggcatgctagccgactgctttttagccataatgaaaagagtccgagtggtttacactctaaaaggttcacgaatgaacacactggacaggcatccgaatataaaactctaaagattacccaccaagtattataaaaattatggtaatgaataagtctaatagcctgggccatgactatttaccataatgaaaataggtatatagcataccaaggaagtgactatgataaaaacaagtcattccaaattaacccagacagcttttgtagcctaataaagctaacaaaaagcagtataacacctttctgtcgggcaccttttaatttgcattgcaataattccaaagaattatatgaccgcataaaaaggattttatcagcattgggcaacactattgtgcgcataatattgccaaagcaaaatatgcctaagtccctaaggaacacaatgggccacgctgttaaaagtattgggctgaggtactgttcaggcctaggcccatttgcacctccgatacccttaacaagaagtcccgagatccaagcgacgcttcgtcttccccgccggaactctcgccattttccccactcc

SEQ ID NO: 51133 - DNA, 785 bp, Oryza sativa
ctatacatatagtgcacacatatatgcatgtgtgtaatatatacatttctatattatgcatatatatatatatatacatgatatatattcatatatatatatatatgtacaccaggcagcacaacaaaattaaaaaaaaataaaagaaaattctttagtctaaagatggctttgccggccacgtggctcagccatctttagtcccggttggtgtcaccaaccgggactaaagatggagatatactcccaggtatttgaaccgggactaacgaccgccatctttagtcccggattctccctcccggttcgctacccacgggtaaagggggttgcgaaccgggagagatgagcacttctccagtagtgatttggttgcttcgacggtgcatttggtcatgctcttaagggaggagactcaggagaaagggccgaacagggcagtgacactttgaggtggttgaagggggcggcggggcagggaggttgatttacaaggcgaaggaagatggagctagggctaggtaccaatctccggtgcagcttgctctaccaaatcaacctcctagcaaccaactcatattcattcaccaggtattccacttccttttaaatgtggagtaacttactcacaaacttttgtgggctatgcaaaagagaaatagcttgagggtgacgcctaatcaattaggaagagaaccttgaagagtaacaagctgacagatgaaggtcagatggccattccaaaagggctcaaaatgcaatatatacctagctctgagtagccc

SEQ ID NO: 51134 - DNA, 610 bp, Oryza sativa
agtgtcctacgggtaaaaccacgaaatcatagtgtcctgtagtaaagtgtgcctttttgaaaaggagggtcaaataaataaacaacaaaaaagtagtatgaaattggtagttagagttcaaaacgaggtgaaataagcaattgttcctataatataatctatatctatctctatactaatataaaaagcaccagttgtttctttcttacatctacatagaaaagtgtacacagaagttttctaattgttggatcatctaatctaactacgtaaattacaagttagattaacattgcgattagcgtctgattaatagctattagagcaagtataatagaggactataagaaggctaaatgctgaggtggatgagagatgagaggagagagatgagcacttacaaccagcttaggcacatgaaccaagaaaatttgtgagacagacatgtggaccatatatttagatgagagaggagaggagagagatgagcacttacaaccagcttaggcacaggaaccaagaaaatctctgagactgacaggtggaccatatatttacaatgaagagctaaccacgagtacgaagggagtatatgagtgagctgagagag

SEQ ID NO: 51135 - DNA, 3379 bp, Oryza sativa
atatatatatatatatatagtatgcaatattatatattagataagatcagctgaaactccgatactatccctaattatgattaattacaggttagtttttagggttctagacaagactagggttgatgcatctcaaagtatgtaaagaaacctaaagtccaaacaatcaagtaattaactaattttcaggatggtagattccttagctaacctaatctagcgaggtaatttagccaataccagtataaacctaaagcgagtctcagccgatactaaatcgagatactagactagattaagtaagatatatgataaactatgctacaaaaatgagactaatacatctaaagcgacgcaatagccccgataatgaaaaccatcaagacaagttacctcttgtcgagagatcacaaccgatgccccgactcaaagcaaaaactcatctaaaagttaaagaaaaaggtggcgatgcaccgaaagttgtattggttggatgtacgtcctgttttacaatgatcttggatttatatttatacctagagtacaaaacttgtctattatggacatgactcaaactttccaaaagataaaaacaacaaacaagttcacatggaggactcataccatatctttaatttaaaacgacattaaaatcctaattaataaatacaattgacttaaatatgccatatctctatatggcaatgtcagttatctcaatcgaggcccaaaccgagcccaagtcaagctatatcggccactttcaatatcgactgaattggttcccgactgaattgatacgctgtctgtttttggtaagatttaatctccttcaaatccatttcgatatatgtctccaaatccgagtatatcttgccaaatttcgttgttaacacagtgaaaccagagagagtgcgatgcaagacatcagtgtgaactgactcccacggaaccgcgatgccggtactagtcctaggaaacaattcctggtacccacagtcaaccgagatacatcattgcaactaaacatagtatagttaggttatacatttagaagttacatgttcagagcaactcctgaagtgaaaccgtcaagcaaagaagcaataatggaacctagcgcaactaaacccaatccacaagcaatgacttgggtttagtacagaaatgcggaccttcaacttcacttcactttgctctccctggggaaatcaataacaattgagtacatacgtacttagcaagccatgggaaatgtgagtatgcaagcttcaaagaagggttggtttggtttcgcagacttttgaaaacatttttcaaaaggacaattgcttatttgaccccgttttgaaccgtaactaccaatttgaccctactttttgaagtttgcttatttgaccctccattttagaaacaaagctcccgtctgaccccctttcgatgactccgttagggttgaatttaaaaagaaaaaagaaaatgcttctaatattcctaatgtccaaaataccctccaaaccctatcctttcactcttctctggtttagggcgctctctctcgtgcaaactgcaaagtgtgcggcagcggcgagctgagggggcacagggcgacggcgactgagggggcgacggcggcgatttgctggggcggcggcggcgatttgagggggcggggcggcgacgatctgaggggcgacggtggcggcgtgaagcagagccccgccgaggcccccttgtgaaggtggagggcggcggcgatctgagggggcggcacgcgcgcggaggaagtggtggcggtggctgctgcagggtggagaaggagcggcggcgagcagaaggagcaacgtcaagtggcggctgcccgagcggaaggagtggcggctgctcgacgacgacaaggaggagctaccgcggtgggtcggctatggctgagcggcagcggtctccgcgactgcgggttgacaacgacgcgctatcctgcgccggctagttctccggcactggatgccgctcgccgccgtcctccgcatctctctcccgcgtgctggcgagctccgtcaccgcacatcctttgtgcgccggcctccttcctccgtgcgcgtgatgccaccgcccacccaccgcacgccggcgacctccggcgccgcaaagggcagcgctccctcccttcccacgtgccggcctccgtcttcctccgtgcgagcgccgccgccacaaaaatgacgctgccatgcccaagtgtcaaataagcaagggcatattggacattttttgctccagttaacactgttacatgcccttaacagaatagggtcagattgtatcttcaattttgaaaaagagggtcaaatgagtaaagttgaaaaaagagggtcaaattggcaatttgctcctaaaacagggtcagatgcgcaattgcccctttttcaaaacactaagtgtgtaattgtcccatttggtcgaaaagaaactctccccttgatcctgtctacaagttgctttgcaacaactcaagtagatgagacaaattttagttgattaataactatcctcccgcgcgacctaccatgataccgacacacaaacttcttccaataggcagtttccaactatttctcgtttattagtttcttttcattttccatatccatcaaccatcagctcaactcatgtctcatatctttggttcccacagctgtccaaaatctctagcccacaccgtgttctgttgggaagcctcaactatgatgtcattcgacatcccagttcacataggactgtttcagaccatgtaatggtcatccagtagacatcatgaccgattttggtaacgatttccaatcccacaaaatgtttgtcacaacactttgcaagcaaacctatgctagaggaatcaccttccattcgcccataaccatatgcatggttgttcgaacagtttggtaacctttgcagagggtgtgcactttactcacaagatgtgatcttaccttatcactggccaagtagggggttcgcgacaaggcctttccaaagctaaccgaggatacatcatgccacacaaaagggttctctctgaatcgagtatcagacaaatctcgaccatcttctatctaggaatctaggatgtcaccaatcaaccgtgcccaacatgttaaaatttagggaaattttgctacaggacacttgttatgtgtggttttagccctagaacactgcccaaacccacttttgggggaaaacactccataaacgtggtaatttgccagtggacaccgcgctgattaaaataatacttttccgttgggaaggagagagaaatccgtgaaatgtcaaaaatgccctgggccccacatgtcagctctatctgctatctctg

SEQ ID NO: 51136 - DNA, 745 bp, Oryza sativa
agagatcaattgcagtgggctcactgtctttgtatttttcttgcttctgcaatgttgagagatggcatgagtaatggttatgttaaagtacatagataacacaaaaacatgtcctccagaacaagcattccagttgacattgagtctttttgttaaacattgacagtggttgccatgtataaacttaattgatgtcaccccaaataagtataagcatgacaagagcaatcaaaccaaattgatacagatttatggataaaacatgagcatatttttacgtggtcaaagtgtgagataatatgctactctccctactaaagctttaaatcatatagcattatgcagagccactatcaatatgcagatatatatctccactggatctgaacacctccatcaggaaacacaaaaactacatccaactagatgacatcatcattttttttcttaccacgacataggcatgtgcaatgtaagaccgagatccggtacgctgttgaaactgaactttttcacgattcagttggttttggcacatttgtcctgcacatgacacaattacatagcattagtaatagaaccactatgcatctgtcatttccatgcaacatcattttcatttgttttcgcaagtcactattacattaaaaatgcaaatagagctgatccaaacagagctataaactggactatggaataattattttgccacctgactatcaaatttatgttgatgtatcttagg

SEQ ID NO: 51137 - DNA, 682 bp, Oryza sativa
aagttacacaccaaaacctaataaagtatatggaggtaataaatgttttttttaatattgcgcacacatctaaatattgtttaaaggagacatttatgcaaactatatattgtggtgtaaccagacatccacctgagctaggacagtgactagaagagaacatctgcagtctgagagtatatacgtacgtaggatatatatatgttcatatccggaatgaaataaatacacatggacctgtcaaacatttgttcctttttagctagctaatagctgtttaaacaagcctgtcaaagggagcatgcagatgcacaggcacaggcaggcagaggtcaaccaccaaacgctttgtttttgtgtcacggagtgcagctcagatccacacgacaagggggtcagtgtcccaagcgagaaaactattagggcaaagaaatgcttttggaatccagccagattggcagattgggtcacatgaactaaccagaggctagctcagctgctcagctcagctcacactcactcgtgcatggatgcatgcaaaacctaataggaaagcaaaaaaaaccaagaaaaggatctcactgctgctatgtaaagtatgcttccaccatttagtccatggtcaccttcaccaaaagctcttgtgcttagctactaagttaattaatttgtagcctttttg

SEQ ID NO: 51138 - DNA, 649 bp, Oryza sativa
tggtgcaccatgaccggccgagccatcaccaccgctgtcgcttcccaacgccacaaccagccgaagccgccgccgccgtcaccagccaccgttgaagcagaagccgcttgcccgccaccgccaccagccgttgtcgaagaagaagtcggtcgcctgccgccgccgccgccgtcaccatcggtagcctagagttaagttggatggagatttcgggtacatgttacttaggccgagggcatttatgtccttttgaaatttctatctcctctttttcactgaaaatgataaaatattgtctcagatttactatagctaattacacaaattttgtggtgcctattagtagtgtcgcgttttttgagtgtcttctagctaattacatagcttagcttttagatgtccgtggcaaattttgcctgatgcttcttttttttttttactaattagtttctttatcttcctaagttccaagctgggccttaattttcattgcacatggcatctgctttccattctcaaactgcaaagcgacgcgacgcggcacgacaccaaaaataagtagaagcgtactccatactctgcactcaaccatggcggaggcggccaccggtgcaactgacacgtcactgccgccgccgccgccgcacgt

SEQ ID NO: 51139 - DNA, 723 bp, Oryza sativa
aaatggcactcgaatgtaaaaaaagaaaactcaaaccctaactttttttattttgaggatgtaacatatgtaaaaaaaagctcaagaattatagttgattttatattggagatttgttaacacaagatcttataaacttttataagattagctataatcttatccaacaaaattatgtgctgcaatcaaagaggccaaattttcacatcccgtgtgcgcctccgttaccgcgaaatcaaaatgcctgccccgccactttttttgatgctaaaagtcatttatgcccataccagctattgaactggcatacccaaatgaggtcaatttaggacttttactcactcgagtgtgacacatatataggtgaagctgaagctaaccctagaatcattcccactccctccatctgcacagccgccgggcaagaacaaccttcttgcagatcttgctcggcttccaaaccggccacccctttgcttccctcccaggagcaagacgatgggcctgggaggaagatgctcggcggcaagaacaagcctccccaccctccttctgtcttccagatcctgcggcaaccccttgcctccctcctaggagcaagacaatggtgcttggtggcaacagcacacattcccgccatccttcggtccttccagatgaagcggccgccatggagatgctacgtacttctcagctcatccttcttagggtttcgaggcttgg

SEQ ID NO: 51140 - DNA, 536 bp, Oryza sativa
gacgtaccagctaacacaaccggcacaaagaatagcgaacggtcagcaatcacgaagaaaaggaagggcgagagaagcgtgaatagaaaggatgaagggttccatgttgttacccatgtttcgcctaaaggagagccgctcgacgctaagacggcacgtgcgaaattcagttcacagtgtggcataatattaagggaaaagatccccatcacggtcaaggactgggatcatgtatcaaatggggataaggaagtcctatggaaagagttgaagaaaatcttccagttcccggatggatcagaggcagcagtgagaaattgtgcactgtaaacaatggctaagtcttggcgtggttggaaaaccaccttgaacaagaaatttgtgaagacgggacgcacaccattttcgacgtatgccaacataacccccaatcagtgggacgactttctgaccttgaagaactctccaaaagaaattcaaaggagccaaaagtatgcagagttggccaagaagaacaaatttcgtcatcgcttagg

SEQ ID NO: 51141 - DNA, 672 bp, Oryza sativa
ggcccacatatcagtgagcagtactgtacatgcagtactgcaggggatctcaattgcatggttttgggtagagtgtgagtgacaaagttgctcgacttcaataggaggcggtggcatcctcatcacggctactcttgtaggtggaggcgtcggaagacggagcagcggtggacaatggtgcctccagtgcaggggtggaaccagacaggactaacagaaaggactgaacaaagtatataaaactatagctccttcttctaataaatatatgatagaaaattttagtgaaaacttaatggggcttccatggttataacgctgatagcaaaggctcgcgtccccgtcgtccccatggcagatccgccactgcctccatgttaattagaccgcagcagagactcctgcattgttgagatggagcaacagggtggagggaagggcaaggacatggttggccttgatgatggagcttgatctattatccgccgcttggatcatgtaacttcaaatgaggtactactgatatatatatatatatatatatatatatatatatatatatatatatatatatatatatatataagcaatctcaggttgtcttgataaaaatgttctgccgggctgaataattggctatatttgagcttacccaaaaaaaattatccttta

SEQ ID NO: 51142 - DNA, 1057 bp, Oryza sativa
tgcgtttttccgtgcgggcgacggtctggcgccggtcccctgattatctcgtgcagtgccaattatggcctgcctggaaacaaacaggtccggcgtccatgaaaatgttttgtgtagtagtgatagtaaacatttgctagtgacagattaattaggtttaataaattcgtcttgtggtttatagacggaatctgtaatttattttgttattagtctacgtttaatactttaattgtgtctccgtatatctaatgtggcacgtcaaaactttttaccgctggatctaaacacggcctgaatctaaacctaagaaaaatagaatatgaactagactgtacaaaatctataaatccatgtgcacgtactactaggagaaaaaaaacatggcctagggccttgtttagatcccaaaaaattttggccgaaaacgtcacatcaattgtttgaacacatgtatagagcattaaatgtggggaaaaaaccaattacacagtttgcatgtaaattgcgagatgaatcttttgagcctaattaattacaccatgatttgacaatatgatgcttacagtaaatatttgctaatgacagattaattaggcttaataaattcatctcataatttatagtcagaatctgtaatttattctgttattagtatatgtttaataccttaaatgtgtgtccgtatactttaaagtttttacaccctaggcgatgaaagaaagttgcacgcataacaccagcaaacagttttgtgtgttgtgcaagtttgggtacgtacataaactaggtataggggcaggagaatcagcttacatgaaatatgcttacaattctttaatctgtgttcaggacgatgggatcagattccaaaagaaatgaagcatttccattcaaaaaaaaaaaagaagagagaaatgaagcatttgaggtttcctttcgagatagcaatgcagtgatcaccaaaagtcagtagtgatcaccaaccaaatttgagccgaattcgtttacgaacaacgaaatttgccaaactaaacagcattattcgtatggagca

SEQ ID NO: 51143 - DNA, 1572 bp, Oryza sativa
attttaatgtataacgccattgaccttttgaccaatgtttgaccattcgtcttattcaaattttttgtgtaaatataaaaatatttatgttatgcttaaagaacatttgatgataaatcaagtcacaataaaataaatgataattacataaattttttaaataagacgaaatgtcaaacgtttatcaaaaagttaacgacgtcaaacattaaaatatggaggggataatatttaacaccatgtgataaatagttgagacaaaatatactttatacgattattactcaagtaaatcagtgcagagaccgccagactggtaaaaagtggtgacagtaatagattaatagtacttctagaagaaaccgcgatacttaaatatgagatctgagcaattagggtgtgtttggttgcccatattcccctagcctggctcatttctcgcatccaggctgagtttgacctggctaagagtatacatatgcagttgtttggttggttgcattggtctagccaggctagcatgagattttgtttggttacttgtataagagatacggtttgaaagggattttgtttggttggttgcatggatgtgagtgttctttacctcttcatttagttgggtgaggttacctctacaatatatataacaaataataagagtattttgatttatccaattgaatattcacttacatatgcgaatgatactgcaaaatcactctattatctacataaaataagtcggccaacttttcacaccgaatcagtggtacgaaaaataagaaaaaggttatctattatattattaaaggaatagaaaaatgagcctccacgttcgctctcatggcctagaaattctcacattaatcggagaaaaagaaaaagcagagtccatgtagaaatacaatttagaaaatagctgaaatttggaattaaaaaaaataagaaatattagaagaggagactagagtccatatagaaatacaatttagaaatagttgaaattcggaattaaaaaataaggaatattagaagaggagactagagtccatatagaaatacaatttagaaatagttaaaattcggaattaaaaaataaggaatattagaagagaagactagagtccatatagaaaaacaattaggaaataactgaaattcggaattaaaaaaataagaaatattagaagtagagtatagagatacaatttacaaaaaattcggaattaaaaaaaagaattattaaaagacgagtctagagtaggaatatatataatttacaaataactaaaactcgatattaaaaataattaataactaacacgtatataaaataccatatgaatattacacatttgtagtttcgtaaagttattgtaaaatttaaaattatgatgttattttaatatatttgaataatataataagaaaacatatatgctattatatgagagaaaatataatgatgctagcgcgcaatctgtgcatgccactatgctaggttttctttaagctagatgaaccggtggaactaattaatctattagtagtcattgtgcatacattgac

SEQ ID NO: 51144 - DNA, 1456 bp, Oryza sativa
ggcgccggggctcgccagcagcacgacgtgcggccggttatcctccgccgtggtgctcgccaacggctccatcggtcgtctgtaagacggtgtagtgtgcgactgtgtgttgtgtgtagacgacaatacgagtcgtatatatagcccacggccacgcagctcgagaaaacatatgcgtcattagcaattccccaattataattgtggcagttgacgatatcttttcttcaacaaagctaccggtagctattagtgaacagtgtgccccagaacctagtgaatcttaaaacgaagaaagattatgtgatagtgtagcagccggcggcgatggctcctacaagacaaatctcggttttgatccttctcggacctgtttttttagtaactatataacattcgacagttatttttaaggaaaaaaaactttcacatgtaactaattataacagttattactgttttgctatacttttttgtgctgttcagctgccgatgtaatagtcaggctaaaaaccctaccccttagctctagtttcagtgctgtcttttgaggttgctcttgttgtcttctctacaaaaccagctaatgtggtagccttatgtatctttctgtctgtacccggaccttatagctctgttcatttctagttatggaaatggggcgtcagcccttgataaaaaaaatagttaattacaacgtatctagtatgaaattgttatataactattacataactaataacttatatgtaacttgatcttttctttcaaaaccacatggcattgcaagtgcctagcgtagcggtcttgcaagcaacaagtcaagggttcaattctcgcttgggcacgtgcgatttttttttatatctcggtatcacgaatctcgaagaacatccgacggtggaaaatttgaaatttttaaagaaataaatcagtcgaaagtttttttagcaaaacccttttttttgttaaaagacatttaaggacatgtttgtagcatcttgtgattgtagtagtttcttcgtcatatagggaaagtgtttatcatcctatcgagggaatactcctagttttttatatgctatctaaattgttataattttcttttaaaaaataaataagatagattaatatgaaatactatcactacacaaatatgcaaattcaaattaaacttctacatgttgtaacaaaaataacacataattataaacatactttaattatttttatttttatttttatttttttctttttttggtaatttgtagaggttgaatttaggtttgcatgttaatagagtgatatattttagagtaaatttcacaaaactacaggtaatttgatcaatctactacaaagctacatatttaataaagtgtaacccaaaactacaaatttaaaatcatatttttcagaaatttataaatttaaggtattatatcataaaactaca

SEQ ID NO: 51145 - DNA, 611 bp, Oryza sativa
ggcgaattaatgtttcttctagcgaattcgaaaaaaagaaacacggcgatatacaatagagtttctagaattatagtggattcagtttgtttgcatcgcactactaggaaaagcattatcgcaagcggccgaaaagggtcttcgcaggcggggcgatcgtccgcctgtaagccaacgactgtgaagatctccgatcttcgcaggcggggcggccgtccgcttgcgaagataattttcgcaggcggacgttggctagtccggtccgcctgcgaaaataggaatcgtccgcttgcaaaaaaaaaaacttccgcctgcgaagataggtagaaaatattgaaatttaataataatttgcccgtaaattacttttaaattatttaatagaaattcttgcaggtagatttttatgtacatatatcggaagattatcaagcatttggtactgagaaatctacatatattgcataactcaaaagtgttgccaaaatatatatatatattacaatatttttttacattgtcacttcaaataacgtcatctagttacgttatggcatagcagtgttccactcccgaagatccttgaattcgtcacttgccgctagggcacc

SEQ ID NO: 51146 - DNA, 760 bp, Oryza sativa
ccatatttcgtacttgtccataaatccacgagttactaagtgctccttcactttaaaagcatcgtcaaagtccgaggctatttcattcttacagtcagcacatggacaaattatcttcctcatattgttcttctcagggtgtgccttagcaataccaataaatttagccacttcgtttctatatgtagacaaaaacctcggccaatgatacatccattcccgactttccatatctctaaaaaaatacacgtaaaatatttgcacaattaataccaaatttgtagggtttattgaaaaaacttatcgctattcaaaactaattaactaaagttaagtgtaaattaataaaaaatcatagtttatttcaattttttttacatagacatgccaaattagtacattaggaaaatctacaaaatcatttcatcggcatattacaaaatactataactattttttgattgcaccgaataaatagacatttaaaattttattctctctctgtatatgacaagatctagatctagatctagaactaggtggtggatgtgatagcaaaaataaaaaaaatttgagaatttatgttaccacattaaaccactacaacaagaggcatcaagtattacacatacatctaacatcaacatatcaaaagaaataaaattaaaaacatggagctcttcctttacaattttgcatgcataaatccatcacaaattaaggtctaaaaagcttaaaaaattgatacctagtgttgaaa

SEQ ID NO: 51147 - DNA, 890 bp, Oryza sativa
ctttttccgccgcgtgcgtgaggaagaaggataggagagagatgtaggcccatacagcgtgagaccaggtggttaaaacctattaaaaaggacactgtctataacgagaccattctctctatggtcataactagatacctcaatctcatatctagttgctactagtatactcaaaagtgaatgtatttttttttcttcttatggaattttctcttagattactcatccgatttacgatccgattacaccattgtgttcataacaattaaatctttataacaaaatctcacatgactatatttttatgaaaaaatagaaattacttttataatatatctaaattacttttagattttattaaattacttcttagtcataaaagtaattcaataaagcttgaaagtaatttagctatattatagaagtaacttgaaacaaaagtgaagtaacttgttacgacattaaaagaaatctatacattcatgttgtgagttgtttattttataatcatttttagtcaattatgtaatttatgctgattaaatttaatttctatatagactcatgtttttacctccataacggatttacttttaatgtcgtgataaagttactttcttctttttttaagttacttctataatatatgtaaattacttttaggctttattgaatttacttttatgggtctaagaagtaatttattgaaatctaaaagtaatttaaatatattttaaaagtaatttctattttttcatcaaaatataatcatgtgagatcttattataaagattcaattcttacgaacacaacggtgtaatcggatcgtagatcggatgattagtttaagagaaaattatttttgaagtcgacgtagcgtagagcatcac

SEQ ID NO: 51148 - DNA, 705 bp, Oryza sativa
agggagttattggaggctccctgttgaccggttgaggtggggatcggaaagccacaagcgcgcgcgcgcgccgagccgagccggccggcccgagggcgtggggaggccgaggcgttgcgttgtgtctgcatctctctctgtctctctctcgatccttttgcaatggaccggaatccaaccccgcgagattgcctctgtaacgggcaggcaattcaatacgcattgatcgcgtcgttactgcggcaacgggcggattcctctcctgcgctattaggaaacagagacccccgatcagatctctacgctttctctccgattgctggttcttcctccttgcaccgcttgtgctgcttctgcttccccggttctgatcgcttgcgcacatgagagatcggaacgagcaagccctccgaaaccacacctcgcctgagatctgcaccgggtaggcgggtgatcaagtttttggggagtgcttccgcacgactgctcttcttcctctgttcgtcgtcggttcatttgcatcatgtcttctggagatggcgcacctggagcgggagctggcgcaccgggagccggagctggtgcaccgatcgacaacaccaacggaggcaattctacctcacaatccagggatggaatttcatagtgtataacattctaccgctatctctgtttttgttacttctgttagtcgcaatgttattg

SEQ ID NO: 51149 - DNA, 581 bp, Oryza sativa
aatacgtatgtatcgggtttgttttattcctccttctcgattcctctttctgtttcctcacgcacgtgcccaaaaggacggagagccggtgggtcgaggcgacagtcggcgcggcgactgcggaaggtgacgggggcagaggaggtggggccagcggttggcgcggccacgacgggcggtgcggcaatggagaagggcagcgaggcagtggggcacgcgagaaagccccatccatagtgatcggccacctccgcgcatcccccacccgtccttgcatacgccgtctcctcgcatcccccactcgtcctctcatcttccgcctcctttcgcatccacatctggggtggcatggctccctcaaagaaatcgattcaagcgcgccgacagttgcgcgacgctactggcaagttcagcggtcgcgtctctctgggaggggtgcgtggtgcctcgacatcggcgaaggaaggggcgcgccaggagctcaaaaaatttaagtaattattaattcttttcctatcatttgatttattgttaaatatatttttatgtaggcatataattttacatatttcataaaagtt

SEQ ID NO: 51150 - DNA, 2154 bp, Oryza sativa
ctaatgacggattaattaggtttaataaattcgtctcacagtttacaggtggaatctgtaatttattttattattagtctacgtttaatacttcaaatgtgtgtccgtatacttcaaaaatattttggccaaagaactaaacacagcctaactccaaagtttgcaattaatttggtgttcaattaaggaaatttctgctcactctttataaccaattctcaagctggtttttatccaaagatgtttttcgacaatgcaaaaattggaaaaccacatatgtttgaaaaagcaaatatgcaaatgaaaatttggaaatcaaatatacaatttggaaaagtaaatataagataactaccgattcacctattggcaaaggactcaccattttaagtccggtgagcagggcttttctccatcatgttcaatttcccatcgcggcatccgactccagagatgatgagatggatgactgttgttctttcaatcgccacaccttcttggtcttcttttgttttaccgatgtggtcgattcaacggacttcagggactgtgacttgggtcgtgcctgttggtatttgttacggtcacagataataaatccacaagcgcacgaataccgatgtagcactttaagtcagagtattctaagggtatcgaatcataaggaacgtgtgtgtataatttaagaacaggattcatccaagcacaacaactaaatggtagggttaggatagagaggattcctatgggttaattaacttatttaagttaaggtaaaactttatcaattgcttcggtcaccggctctcccctggtccgccaagttgagtccgatttgtagctttatgatatacccgaacatggaagaacacgaaggatgtacagggctatcaccatctgccacctacctctactttgcgtggagcacacaataaacaaaggtaacctctaacctagacatcacgtctatattattgattactactctagcctcggccaagaacttccttctttatctagagtcttagtaccagagcactcaatataaatactaaccgacgaacccgcaacaatgagaatctatcttacttaaacaagaaaactaaatacccaaaagaaatcacaaatacttatataaaagaagcatctgtcgaggtataagatcggagagagggccgacaactccggtgctcctctaggactccttaggaaataggccaacatctctggaacatctcaaagagaactccgatatttggggcactaattctggaacttcccctatctctcttcctatattctaactctactatcgagtagcctagatatgaaagtgagttgcactccacttgttgtgttgtgctttgagagtgaagtgagaactcattttaaaggcagcaatgatggttactatggcggttatgaggtcggttcacccacaaccaccacagggaaccaatccccatcctccacgtgaaaggtagggatgagtggctgcaaaggtggttcggccgaccccctggcaccgccatttcccctctccttcggctggatcaccgtccaatgggcctttatgactgtgcacagtggttagcctattttgaggtgatttggtcagcttgtgggccctccaatacgtgtactcgcgtctgattggccggatgtgtgtttcttcgcatggctggtggttttcatataaaatccctgcatacacatatttcaccaatacctgtggaaatgattagtaataaccattaccacaaagtttgatgtattatttcaattgcttgtatgcaggaattaatggtcggatttggtatttaggctgtgtttagatccaaagtttggatccaaacttcagtccttttccatcacatcaacatgtcatatacacacacaacttttcagtcacatcatctccaatttcaaccaaaatccaaactttgcgctgaactaaacacagccttaaggactgtcaacagtaccccctgcctcttgggtgtcttggtgttgcggtattggagagggggttcctggatttttcacattttggtccttttgaaaaacttattttgcaaatagacccctagaaaaacttattccaaaaatggtcctttttggggcgccagagtggctagcgccgttgtccaacaa

SEQ ID NO: 51151 - DNA, 1541 bp, Oryza sativa
tcctcctgtcacgtcggttcgcgtgcgccccggtggcaggaggacggcgccagcctccgtcccgttggatgacggcgccagccactctggcgccccaaaaaggaccatttctgggataagttttttcagggatctatttgcgaaataagtttttcaaaaggaccaaaatgtgaaaaatccaggggggttccctcttcaacacctcttccatgaatacgaaggatggtggaaaggcggtgcgacagaggagacaggcagcgataggctacaggccttgccgggctatcggtgtggggttggtggcgtagagcacgaagcagcacggcagccaccgcgatagcagcgaggacggcggtaccatttctagggcagacaagaggggccatgatggcctgcggtgcagtgccaacggcacagctgctgcccatgtcgtgcgcaggaggggcggcaaaaggcaaggtggccgtggcgttagggcagtcccaacccataacactagacatggtttccataaactccacatcatcaagaaactagtactagacactactcttccaatgcaaacaccactattccatacttcaatttaatgctacttatctcacatgatgtcttggatgttgtgtagaaaccatgtctcatgcaagacatgatttccttctctttcctcatttattaacttgccacatcatttttttgtcctaggtggcaacttatttaatgctatggacaccatcctagtcattgggttgggaatgcccttagaaccacgcgtggcagagaggagacggcactaccgacaaatggggccacgctgtcggcatgcgcgcagcgcaattgggccgtgggccggcgcggcattacatgggaggctgggccgggagaggggaaagagggaaggagagaaaggaataagtttactttaggtcccttaatttgtcgccgagtctgattttcgtcctcagtccacaaaaccggatataacgcattccccaacataccaaaactgtgcagatgaggtccctcggcggtttggaaggcggttttagctgacgtggcacctacgtggctggtttgactaggtctccgtcccacgtggcattgatgtggcgcttacgtggcaattatttctcagaaaaataataaaaaccatggccccacatgtcagctgcacacaaaaaataattttaaaatggtgggccccacgtggccccacaagtcattctctcctctgtcggctctccctcttcctctccgctctccgtcgtcctctcgacagagtggcgacagcgggcagagtggaggggcgggcggaacgacggcggcctcgccaaggacgccgctccgccggcggcggtgcgggcaaagcggaggggcgggtggagcggcggtgacctcgccaacgacgtcgcgtgtacctccgacgcgagaagagcggcagcgcacgccggccggcgggagggagggagggagaggaatggggctctccctcttcttcctctccgctcttcctcgtcctcacggcggagcggcggtgggca

SEQ ID NO: 51152 - DNA, 4985 bp, Oryza sativa
accccacccgccggccggttcggccaaaggagaaaaatgtgtgtgagagagagaggaggaagggagagagagagagaggggtgatgatgtgtcatcctggcatgtggggcacacgctgagttagccgtcacgtcggataaaaccggggtcaaaaccacctaagaacctcaagtgaacggttttgtaagttgaaggatgtcatatatctagttttgtggttaggggacgattttgtaactcgatgacaagttgagggaccttgagtgtactttttcctgtggaaaatatcctcggggagaagacgcgcggcactgaagggacattgcggcggctgcgcgactagttggcgacggaccgacggacgagacaaggaggcgaccgcgacgctgcgctttcccctccggtggctttccccaatgtctgcacagcgaggaggaccgtgttcttggcggcgatgctgaccgcagtctgacacgatcttgtcaactaaaattcgcgatgctactgaatagctgaccatgatgttgtgcgccatctgattgatttgcttagctagccttttttgtttgatcgacagaaactcctgtactagtgccatctgctgctggaatgacattgtatcctgtctgcctagctatcactttaattattcaagatcttgaatatgttaagtgactttaagaaaaagtagggccatccagttcattaaaatgaaattaagttctctgaaccacactgaatgttgcccccaccatgaggtaactgacttactcaaactgatgttgctgaggtagtttctttctcgtgtttagttcagatggtgcttggtctgctctttttagttcacatatatgcatgcatcatcaagtgtctttttttgaggaaaatgtttacaacttggaaacttctgtactcaccaagtttagttcagatggcgcttgctctgctctttttagtttacatatactgctctagttactgaagcagattctacttcatgtcatgtccaacatgtttaagtatgccaaaagttgacgatgatcctagttcatgtcttgtgcataactttgagttgtccacaagttctttttcttctctagataccctaaacacttgtatgtatcctacactgatgcaaatcctagtttttacatgccatgcacaaagattgttccctgcttaaggataagtataattcctcagccatagttaccactgtttacttttcatttgaatttaattactgaagtgtgttcttcataaatgttgaccatggcaatttaattactgaaggtcctgatccctatggtttattaatatcattggagcatacagttctggtgttagctcttttgaccatacttatctatagtaaattagtaagtagtacagtatacatgttgctttccctttttaccttttgcctgtagctgctagataacatagcagtctccatttctctgtactacaatacaaagtcaaaaaacatgtagccgtgcattgacaattattattttattgtatatctatataagtagtatatatgatctctgcatcttctgaaaatgcagacaagtcaagataaacaactccaagattaacatgatttctgcattggccatatatctatctatctgttatacatgatttctgcatcttgtgaaaattcaaacatctcaagattaacatctataattagtttggattaacatctgaatggacttcaagatgttatatattgtccattgtattatgtctgctactttctccgtttcacaatgtaaaactttctagcattgcccatattcatttagatgttaatgaatctagacatatgtatgtgtttagattcattaacatctatatgtatattggcaatgctagaaagtcttacattgtgaaacggagagagtagaagggaaaaaagtggaattggtgggtagtaggttaaaaatatggaggttttgtgcaaattcattaaccaaagttttgtttctttttatctgtttgtgagataggaaagctgatgtttactcttgtgctttgtaggttccttgaaatcgactggtatggaaattccagataatttatttgatggtagcaatttcctgaagttcccgaagatttattacttcagacagcatggtgaaagtcagggcatcattatagcgtctcctgctgctcagctcatgccactcatattagacctttttagtttgtgatgtatctgagttccaatgctcgtttgtttggatttttagtagcacctggacacccagtttgtgttgatgattttattgacaatgacttgtatgtattccgttgttgctcagcagcaaatttctatggattaggagaagcaaactactactatatggcttttatcctgctctttcttttcttttttgttttgctggaatgaccgaaggaggtcattcaatataattaagataggaagaaaaggttacaagaaaagttttacattgacagctggctgtcgaggaaggatgtgcaccagagcacacgccccgaaccatgtgtcaaccgtccaaacacacgctatagaaagggaagccaagcaccgaaccggccatcgctatgcgagaccgatcgccaccaagccaacaacaccactacgacacgaagactctaaaacgacgccctcacgagggttgcgacgccgaaagacgctgtcatcatccgtccaaagctggacaaggttttcacccatagttccttgccaagggaggaggggtacctcaacaataccctcaggagggttaccacgcctgaaggcgtagtcactgttggcccaaagaaattgggctaagctttcgcttggaaccccttaccgccatggtccgtcgcccaatccgaaaccaccatctaaacatcggcggcacatggcttccgccatacccgaccgacgccccaccgtcggtcagtttccagtcctgccaacgacaagactgccaccacaccgcaccgacgccccaccgtcggccgacttcatcgaaccaccatccctgaaagttggcctaggaccccctccgttccaccacccgccggcctccttgccaaatctggccggaggaaaacccgggactaggtggcattgcttcgacatcctgagcttcccccgctgacaacctgccgcctcaatccaacctagaaactccccgcaaagaagggaggagctccaagaagggcgatggtgacaaccggcaatgaggaaggcgacccaccgccgccagctccctttgcactaccatctgggcctgcgccgacgctggaaacgctgccgctcctgctccggcgcacccccccccccacgatccagcctccacgccggcctatgcgcctctgctgctccggcctacgcgtcgccgcgccaccatcccgaggagcgcgggcctccgcgctgacagtcgcgcctccagccgcacgtccacgccggcccctcctacaccgacctcgggccgccggccgtgcccccgctcctcgccgcccgcggcgctgtcccgcgccggccgcctgatctagcggcgccagacccggctgcccgagctcgccggcctcctccttccccgcctccgcctcctcccgagcgcaggcttcgacgtcggcgttgctccggccagcctccaccgtggatgcccgcgcctgctctggtggtggtcgccgcagccatcctcgtgagcctccagctttgctggctactcgttcaagcggcggcgaggcaggggtgagaggtggggtggggcgacggcggcggctagggttccgccgcccatgtcgcccatgcgggaggcgacgcgggggccaaccaacctaagttcacgtctattctgctctttcaatttatcagattttgatagctaaaacgaacatagggtttaagacagggaataagagagagcaagggattccaacccccatagggattgagtgacatgggagggattcactcaatcccttcctggatatattccacttggggattaaatcccaaggaaccgaacaatgcctaagtggcatcaaaactcctggattttccctcgaattaattgtctaaagactttcttaactaatctgaacatcttgtatgcataagttttctttcttttttttttgctggacttgttataaaaccctcgatctatctgcttggtaactctaaatattttatttctgccgtttaaccccctctttcaattcttttataggtttattcagcatggatctttattattccaatattcacaaaagaatataaattgaagcatatgatggtgacagatgaaagaaacaactgatgaacaggggaccgaattcactggcaacaggagcagagccgaggtcgcttgccttcaccaccaacacggccgtcatcgctctcctcctccctgcgccgaccaggccgggagagcgacattgccggagctcgaggaggtagctttgctgggatccaagcaaaacgcggtggatgcacgaggtgtagcacaagcagaggaggaggaagacgtacgatggcgatgacaattacgcgtgcatgaacttgcaagtgatcaagtgatctaaacgcgtgcttgtgaattcgatttataatacagtataggagtgatataacgcggtgaggaatactcgctcgtttttcctcctcgctgcttcctcgctgctggctgtcgttcatggggtctggttaggtttgccgagtcaagagtcatctcttttacccttctctgctgtgcaacttcttgtgccaaagatgattagtgcctggtggtcaattcaaacaaacagttgctgttttggttcaagatgatggatgtggttaggctggtgttttatggatgagcaattttcaaggagtgaaattgattcagaatagcctggatttttcacattttgattcttttagaaaacttattttacaaatagacccctaaaaaaacttagtccttttcgcggcgccaatttctttg

SEQ ID NO: 51153 - DNA, 6614 bp, Oryza sativa
ctgcagccctgttcttccaatctcaagctctgcttctctaataccagtcccttgcttccctttctagtcttcactcctatattccttgcaattgtatcccaattacttgagtgatttctgctgtggatcattggttccttcctgtgttgatattgatctgtgaatgagttgacggatcgtgacactccccctcgccttgtcctcttctaacttcatggccacatatcaggcatcctccacctgttgagcagagcagtgggaaaacgagaatgaggagaaggcgccgcagccggcaagctcgatctcgtcgcgcgcgccgaccgtcgcgccattggagcgccagaagcgggcgggtggcagcatggcaaaggcttcgggagctcctcaaccaccgccgaggcgctccgcttcgtcgagcaccgccagcgcccatgccgccgcgcgcttcccttttgccatacttcccctcgtcctcgccggcggcgaccagtggagcgcttacgtggcagaaccagaaccagacgtgtttcgacgggcgtaaataaggcccatccacacaaggccttgcaaggcttaaagccgggcccattttgaagcctatgtattccacgcctagtggcctagtggactaggcccacaaaactaagctcaaatctcacttgagagattctcacttaggccgagtttagatctaaactttttcttcaaacttctaacttttctatcacatcaaaactttcctacatacataaacttccaaattttccatcacatcgttccaatttcaaccaaacttccaattttgacatgaactaaacacagccttaactcatttttacaagtgccattgataagttactactccctgcattctctaatacattttggtatttgtttatgataaatatggtttctgatagctaatggatctaaatgtactaatattagaaaaaataaatacttttgaatacaaatgtaatcataccactatgttacggggaatgtttcaggtgcgacctcccatttgggaggaaacatggaaccccgaaccctccatctccaccatctagacgcatcctcctctcccgccaatcattttcaaaagaaataaaaacacccaccactaaataatcattttgtattttagttcctagtgttcactttctctttttctctatatctctcttccccctctctctctctctccttcaacgcgactatcaaaagagcaacattagtttacttcttcgatgttgtattatgttagtatttatctctacaaaacctggtaaaagttagaatacttttatctagaacaatgtagtatcccttatatttcttatattttaagatgggaagtatcatataattttgaaaattatataaaaatgtcaagtgagaatttgtatatcacttgaatctattgtactagagcgagtcggagtgggtgagatgtcaccacgtacaaatttacaaaaagcatgtgattagctctagacaaggttctaattaaagaagtttgagatcaaagagaggaagtgtttacatctaggggtgaaaatttttggcgtgtcacatcggatatacggacacacatttaaagtattaaatatagactaataacaaaacaaattacatattccgcctgtaaactgcgaaacgaatttattaagcctaattaatctatcatttgaagtattaatattgcttattttttaattccgaatttcagttaattttaaattgtattcctacttgaactcttttttctttttgctaattttagattttatttttatttttattttgaatattaattaatctcgtattgggttcttatatggactcttctctcaatattccttattttaattttgaatttcagttatttttaaattgtattcctagttggactctctttttcttttctaattttgggttttattttatttttattccgaattttgattaatctcgtgttgggttcttatatggactcttctttcaatattgcttatttttatttctgaatttcagctctttttaaattgtatttctacttggacattccttttctttttctccgattaatgtgggaatttctagcctccgccgcgaacgtggtacttcctttcaaagctatcttttttattttgaattttagtttttctattttatttttattttgaattttacttaacctcattttgtgttatagataatctctgatttcaatattttttatttgttattttgaattgcatcttgggttgccctcatgcgattgctactattcatcacatgagcagttggccctcctcccgcagccctagtaggacgaatttacgaaaaccttctctaaagtccgatgcgcctttttttaattgtcttttttgaaattatttttatttttattttgaattttaattaacctcattttgtgttctagatgatctcttatttcaatatttttatttgttattttgaattttagtttttctattttatttttattttgaatttgaattaacctcattttgtgttctagatgttctcttgttacaatattttttatttgttattttgaattttagtttttctaaaatatattcctactcaaactcttatttttatttttataatttcgaaatttattttattttgtattctgaattttaattgatctcctatcgtgtttaagatggattgttattttaatatttcttttttattctaaattttagtaattattaaaaggtactactactctaactctcttttttttctactttcaatttttttgttttatttcaaattttaattaatctcgtggtgtattttacatggattattctttcaatattccttatttttatccgaaatttagttgtttctaaattgtattcctacttggactttttttttccacggttaatgtgttaatttctagcatctggattgagttttttacatttgtaatttgaatttaaaaggattttttttcaagaatatgcaaaagaaacatagaaacaatctagatctgatgataacgcccatgttcttttgctagtttttagtgtgcccattatttattttaccaattatttatttctttttatgcctggtatattgaaaggtgtaaatcacgttaaaaacaatgataggattatatgcagaagaactattttactgatgtctcacatgaaacctactctagttctgtttccttttgctatgttcctttccaaatagagtctagtgtcctgatgctactgctatacgccatactcaatatgagttgtaacgtgctaccatgtacgtttctatagtgcttatgtggaacaacaatatgtttccaaaattttattcattaaatctcaacccttgagatctaaatttactatgatctagtggttaatatttttctctttttctccgattaatgtgggaatttctagcctccacagcgaacgtggtgcctccttttaaagctgtcttaatagtataatagatatgtagtgtaaattcaaaaattaccgttggatctaaagttaaacgtctaatatttgttgacatcatgaagattaaaaagtttactccagataaattttgtacaaatggttgaatctagaaataaaatttttactctcggtggtgtaaacaaatctcaagcatccatttttgggtcaaacagtagttttcaaattttcattatatttgtgatttgcactacatatttttccgtttatacccataagttgactacatagtaagacattataactgtagctctatggtcacaagatatcctggtgctactagctgactggtgaaccctctaagagcatactaaagaatgagcagactcatgggccaacaacaatcacgggtccagccaagtaataatgggtctagtattctcgagcctacactacagcatggccgcacgaacagttggtgggtaaggcatttaatgcctccctcaacgatgttgaagccccgcgtgcaaccttctcctccaaaggcaaggcaaggcctgtaccttgctagtggacggatccagggccccgcttacccttcggagtggacggcgcccctccggcacctcaaggagggatgatattcttggggaggcttcggtatcgttaccccggaggggttatcgaagcctataatatcccccaacagttctttttgtttttttttcgcaaatacgcaaagtgcgtatcatttgtattgagaccaggcttttgttttcttttgtgggcatacacaattaaacatacaaatgtggtgtgatcttgtttgctgattttttttatctccacttgtgcagctcttctgaaccaacaactcctgatcccttgctctcaacttgtgatgtgaattgcactgacaaaagaacagaaggactagctataaatcgctaaagatttttttttaataaaattcacacgaatgtaattacggtataattacaccgcaattggacagtagttgaataaaaaatgagattggttagtagctaatctggttatggttgcatgccctaaaccgtgatatcgtgggatagattcccattacctgtgccctttctcttttttttttccgccagttagcactcatctcaacgtgaattttttttccgccagttaacactcatctcaacgtgaattgtatttcataattaacttattggacatatttttatttccccgagatgcaagcatgattcattataaaatatgttggtcaaaacaagcacctagtgtccttgccagaaaaaagaaagggcaactagagtataaaaataagcgaggtcagtgagacgctgacaattaagattttttttttgagaaatgaaaattaatatgtcaagacgcggcaacagccgcctcatttcttctttgccatatccgtttgttagcaggaacagaatcctgaccttaatgccatggcactgtggggcgggctgggtcaggcggcgacggtggcgcagctggtcggggcggacatcggcggcctcatcaccatgatcatgcaggttgcgatgacggctgcggtgggaggagcggccagccatttcggaagtcgtggccaatctagagaaggcgctcgagctcgtccgttgcgacgggtaggcggtagcatagcgtgggctcccgagacatcttatgtgaataattgggcaatgtataatgtagtaataattaacgctgtttgcttctgttctcttttgtgcgcatgcacaattaaacattggtccaatgtggtgtgatcaactaacaaaatcttatcatttttgctgatttctaatgtccacttgtgcagctgtgctgaaccaacaacccccggatcccttgctctcagcttgtgctgtgaattcaagtgttaagttaggtgcctcccaatctcttcctgttcatctgtttgcaggtaggagtatgaggaagatatgaagattggtgtaaggaatagttgaagacgcacggattttaactggttttgctcccattagcacaaaaaaagatcaacaaaaatataaaggccttgaatgttctgaattttctcttgacaccttagcagccctgcaactgctatttcttcgtattttccccacaccttctccctgctcttaaaactaagaatctcgttcatgtctgtgcagcagtatccttcaggattaaagcggggttcatagggctcagagtgtattcaatggatgattgcaactgacgtattttcccggaaatgtttctcaaaaacctgataataggtacaggctacagagttccaagaatatactggatagtaacggacactgggcttcctttgcgcggcatttcatcgaacacttggagctcaagaccaatcatgccagtataccatagccctttcgctccttctctctttcaagagcgcttgaggcgaccgcgagccatggccgggcgtggcgtggagggcacgagactgtttgcactatctgctcgactgctccgccgcgggcgccgcctcggcctcgtcgtcgtcaagggattctgcatttctgctgtactactcagtagtatagtggtctcccttcctccactaccggcggtggccttggtgggcacagcaatgttcttggaagctaccgaagctaagagagaggaaagagaagaaacaagggatgactatgcccatttattttctgtaagaagtttgacataaccaaaatgaaagaatatcacgtcaaaaaaaaagaaagaatatgtaaatcctcattatcaactttacatagcaaaaaaaatgcacgtagctaggagcctaggaagcaaatagccgggtgttaattaatccatgttcgcggtgagcattcttaattctgctagctcgactccctgacaggctaaagtcccctgaacctgcagctccagggtttgctggctggtgaaggcgaataccccatataccttctactccctacttcactgacaggtggtgaaagtccgccatagcttacactgcctgcttcactggcagctgaaagtccaccgtggttaatattattattatgtgctccattgacagaagaaagccccgtgctatgctccactgcactgtagggatttgcc

SEQ ID NO: 51154 - DNA, 703 bp, Oryza sativa
ctcgacgacacgctccgggaggcgcacgagcttgtgttgtcgtgccaggacaagagcgccgtgtacaggttggtgatggccgggggcaggctgaaaagttcagggatgttcagagcaggatcgactctacctctcttttttccagttattagccacatggacatcactcgccgtttcgatcgaatttacaacatcttgcttccaaacgacatggccgggccatctatgtctcctgtctccatgccccaaatccctgtcccagcctcccaggtacacattgaaatgcatacatatataatactccctctgctcaactttgatcgtccgtcttatttgaaaaaattttataattagtatttttgttgttacgagataataaaatatgaatagtattttactcgtgacttatgttttaaaattttttcaaaaaaattttaaataagatgaatgatgaaagttgggcatggaaaaatcatggctgcacttaaaatgggatggagggagtatatatatcctcaaactttcaattgcactttgtacttggcttcaaagggaagcttagaagttagaactcagctctaattttaccattcttccattatgtgcatttctctatactaggatactgctaagatctgttggaactggaaggaaccccatagagtccaagagtttaattttaaggagctcgcaaaggcgacca

SEQ ID NO: 51155 - DNA, 705 bp, Oryza sativa
ggggggccgcctgcaaatgggcggcgagggggcatggaattttgcaggcggcccccttgccgccctgcgctagggcgattttgtactgtgctctatatttttgtataaatatcaatagttatcaaatctttttatattgaaaactatacaagattaaaatctccaagactggtaaaatacaattttattattttttagggcatatttggattgttaccgtacaaatatttttttaccgtacaaatattttattaatttttagggcatatttggattgttagtgccaaatttttcttcacgaccaaatatttggtaaggtaaaattgcatttgatcatatttggtttgctgccaaaatgtaaaattgtagtgaagaatgttctacataatctcaaatctagattacgtattaccaatgaataggctttcattttcgtgtgttgtgtgatagtgggaaagaagatatgaagaggttgccttcagattgtcaattatatagcgtcgttttcactgcaatatatgtgaactcaatgagatacattattcattagatgtgacaagacgatcacgcgtgggcgtgattcactttatgtaaacaggcagcgccgaaagttgatagtgataactcgagctgccgcttttcatgttgtgctgtgtggactgtgcgcgctactggatctgacactaccgtgcaccgcccaaagtg

SEQ ID NO: 51156 - DNA, 1138 bp, Oryza sativa
ccatgctggcgccgccgcctccattcatgtttctttgtatagagttgcaacggtgtcatttttattttatttttttggatgttttttcacactcaggatcacgatacaaccaaccacaaaaaaaatttaaacttgaactaccacttagctaagtctaaaaatagctagcgtaccacttagtctactttgcaccttcactaaaattagaccataactcctttagtaaaaccctttgatcagcatgttaaacataatgcactctaccattatatgaaattacttaatctaattcaaaatataaccacatgaaatgacatatataagttaaacagtacataaagatgcaatttttttatttttattttatttttttgatattttttttcacacttaggagaacataggaaccaaccgtataaaaaataaactcaaacggacaaaatatgtgacttttagaattttccaaaactctatcgaaacggacaaaatatgtcatctattaaaataggcgtaactttctcatacggacttggaatcaggcaaataatatatgcacggacatctacagaaaaagttacatccgattctccctgctttgctgggttcggcgatattaaaacctccaaattccgcttgcaagattgtgttttcgaggagagaagtttttcggtagagctttggaaaatttgacatgccacatatttcgtctgtttgagtttattttttacatggttggttcctgtgagttcctcagtgtgaaaaaaatatcaaaaaataaaataaaaataaaaaagttgcacatctctctcctctgcactagttcggagagaggagaggagaggaaaaattctacaggtcacatattacgtccatttgagttcaatttttctatggttggttcttatgtgtccctaagcgtgaaaaaaaatatcaaacaaataaaacaaaaacaaaaaatttcagggggggtggggcgccagccactatggcgcactccccctagccacctcagcatcgcctgtaacgtcccgcctcccccaggccgggcccacttacatctgatagctttcataggtcatagactgccctcacagaccaacacatgtcttttctgcacacttttcctcactcgtgtgca

SEQ ID NO: 51157 - DNA, 1171 bp, Oryza sativa
attagcaaatgtttactgtagcatcacattgtcaaattatggtgcaattaggctcaaaagattcatctcgcaatttacatgcaaactgtgcaattgattttttttcatccacatttaatgctctattgtgtccaaatatttgatgtgacatttttggccaaaaatttttgggatcttaacacacccttagtgagatggtcccttgcttgtatttttggaaaacaaaataggaccatgaggggacttcaaagggtctgaaatggcatctttcctacacctattcaattgcttttatcttgtataagatgccattgattcagacctgaaaagacagcagcacatgggctgaggaggggttggtcgaccccttggttcggccgaaccaagggtggctcttcccttgttggcagttgctaagcaccaatttcgaccgtcaatatactcaataaataaaaggaaactagcatttcttatacacatattagttacaaataatgttgttccacttgtccttggagaatattatggatacagggattattgttaacgaccaaatttggtaatatcggcatcggagatgaagatgggatctaagcgaaatcgaagataagggtgttgtggaaacagagcaagaatcggctgcaatctaaatcggctacggttaggatcggcagagttcgagtcggacggggctagccgatacagccgattccggcaatacgatttggtgtatgtcatcgggttgagttaatatgcttcatggtggttgccacgcaaggatagagtcctgagaaggcaactgtatctattaattaggatattttatgtaatttccttaaaatatgtttgggcaaaagtctgccgtaaagacttatggtattttagagtttgttagagataatagtcgtgtccgagatggatatatcttgtaattctcgggtataaatagaccctgagcctcatgtaaaaaaagggacacacattcaatacaatttcggcgcatcgccacccttttgcttttgttttatttcgacgagttcttgctttcgggttgagctgcatcggttttaatctttaacaaaaggtaaagcttgttatggcggtttgcattctcgggattagtgcttccatttttatgacactctaattttgttcatgtaatccgtcgagt

SEQ ID NO: 51158 - DNA, 765 bp, Oryza sativa
atactccttctgattattacacttattatatggacaacaaataaaacccctttgcctgttagcttcggccactctcaaaaaatagtgcacgctgttaataaactctttggaccgccggtcagcgtacatccattgccgatccatctacatgagtcgaaaaaaaatcgtacacaaataattattcttacaataatgacagtcatacaataattataagataattacaaactctttcaacagtcatacaataatgacatatctttattcatacaaaaatcataaaatattacaccaaataattcttatttactatttctaaagttttaaactaattttaatgtgttttacttcttttaattttcattttagtttgttttctattatttaagattaactttcactatattttccttctcaactattttataaaaccttctttagcaaatcaactaaatttctatatattctttcttccccacacaaattttctctctcatcaacttacaactaaattttggagacaaaaaagtgtgcaaaacatagttgcaaatgtaatatgacaaaaaaaatattggaggatgaagttgcaaaccttttaggcacctccgatttgtatgtaatcaccaaaataaattcactagaaattttggcatgacctcccctcttttttgaagaaattttgaagcttgctcgggcagctggaggaggaagaagacatatatatatatatatatatatatatatatatatatataggggtgggac

SEQ ID NO: 51159 - DNA, 1738 bp, Oryza sativa
tcctccccaccgccggccggcttgcccagagggagatgagtgagagagaggaagggagaggaggggaaaaagagagttgaagacgtggcatcctggcatgtagggcccacgtgggtcccacgttgactcacccgctatgtaggataaaaccggggtcaaaaccactgaagggtgtaaaacgaacggttttgtaagttaagggatgttatatatttggttttgtggttgggggacgattttgtaattcgatgataagttgagggactttcggtgtactttttccaatatggatcaggttggactatcatgggcctgggaaatttaggcccattacgctatgaatgaaattagcaaggcagagcgatagatcgttcattgatacaacaaattcaaacgtttttagatcgaattgaagttggtttacgtaagtttgtccgtgcgtaaaatatagtcttttcgttcgtgtgcaagatatagttaacgcacttgtcaataacttcataattacagctcaatcttgttatttaaccacaatacgcgttagttgctttcaagccaatttaaacccaagtatccacatcgatacaccaggaattggccaatttggcacttttttgtggcaatttggtcaatatacaaaacaagcaaaacttttgacatcaagcacacaaattaaaaccctaataatgatcatgtaaacaaggctctcccagtagtggataactttcaataaatcagtagtgtttgagacgcataggagagcttatcatcacaatctcttatcctctctatccagcctcatcatgtgttctatgagctcatctgatagtcaccacaagcccattaataaacgattcaattcaacgagttcagatttattttctcttagcatgtggctctgagtctgacacagaagcttgcagctgaaattccatcagaaaaaagtgaggcagacagccactacccatgaggtgagcatcctttgacgttttcttgacattttcagatggatatgccaagctagaaatgaaatttaatggaaaaaggcctaactttgtcatgtctgcctggatggttacacctatcatttacctaaacacaactttagatgtgatatcatggagatcttgtgttgtaagttgtaacatgttgtttttataggtgatgaaatccagctttgttgttgaaattgttaggcagaccaagaaaaagatttgcatgaagccaaatacaagtgtctgatatgaaatcttgcatcacaccatcctttcatttcattttatctttttgaccatgtatcgtactagtactatataaaaagcattacctcgtctaacttcacatcaatataattagtagaaatcgtagtgattcatagaaacagctccatcgtttgctctttggcttctcagccacatccaaaatttgaatttttaaaccataattttagagttgattttgatttttttttcatcattggcttttaaattgctaaaacacaaatataaaaattttacccacattttcctctctaataagtgctacggcttataatcaattataggcgaaaaaatgtggctttttaaatccttttttttaacattgcccttttgattactaaaaaactatatatatatatatatatatatatatatatatatatatatatatattctgaagtgttaaaaattcaaaagacaaaaaaaaaactctgtgccttcataaatccaagccatgg

SEQ ID NO: 51160 - DNA, 968 bp, Oryza sativa
gtattcaagtttatgggggtaattcgatcgacgcaatagttcaggggtaaaaattattagtgatgaataaaattaaattaaatagtgatgaataggttttttgtaaaaataaatagtgatgaataaaataaaattaaatagtgatgaatagcgttttttgcccaattattagtgatgaataaaattaaattaaatagtgatgaataggttttttgtaaaaataaatagtgatgaataaaataaaattaaatagtgatgaatagcgtttttttacccaaaaagtgagcgcacggcaacaagtctagaatgaacaagatttccctaaacaatatatagattcgtgcaaatccaatcacgaataatgcacggcctgctcaccaattaatggatttccataatcaagttccactgtgtctcgccggaaacatccatgcctcggtttataaggtagtgtaatgttcgttcggtgagcgaggtgggactaaatccgcacaagcacagtagctgcaccgtatgggcctcaaattaagttccgcaaaagcgaaaggcccgcagcccatatgtgtgctgggctcgcacgccggctgagccatcgtcaagaatctgccacgtagtcagagtggtgtggccgtacgtcgtcctgcaaattcttgcatgcgaatgcgatgcatgcattggacggacggactgcgttggctgtcgttttgccttcgatgccacgcgacggtccacacacatacacaccatgcactggtggagaaaccatctttcgtcggtcggccgatttccacaatagcctcggatgcaataaaaaccggggctaaagatgatctttagtcccggttcaaaagggtaacgggcatatttgatctttagtcccggtttgtgttaccaaccgggactaaagatcatctttagtcccggttcgaatgctgtcagggcctgtcaggccctcccgggatctttag

SEQ ID NO: 51161 - DNA, 3553 bp, Oryza sativa
ttgagacgtgttacctcttgcgaagcagagtcgtcgaaaagtaaaaacaaaaagggtggcaatgtgccgaagttgtattagattatctcctatattacatagctatggggttcatatttataccccgagtacaaacttagtccattatggacacgactcaaattttctaaagataaaatacaaacaagaccatatacagtggtctcttaccaaaactaatcacaaccgacttaaactaacctaactaatagatacaattgccttatttaagctctatctctaattggcaatgactgttacctcaatctaggccctgctgagcccaagttatatctatcgtctacttgccatatcggccaagttaagcctttgttctttttccagccgatacgacactcagccgatgtgcagcctgacttggagatcaactcgattccacaccaaatccgtctcgatctttcttcttcctctccaaatcttatgcaaaattctgtcgttaacagttacccttttttttaacatacgcatggatcatatctctccttatcttgccgctgccctttctgacgacactggctcctgctgccactagagaatctcttaccagccacagtggtattgacgaaatatttcgcctctaatgtggaaaaacggaagacttagctgatcctctgcacgaccgtatcatcaatctgcatgttaatatcctaggcgaccctcatgttaggactttcttctttcaaccatgtccctttttttaatttgatccgacaatttcgctaggggaaaaacttatttttgttgtgatgaataatggtttggcagttgatttgatccatgatgagtagtccttgcttctcgtttcgacggcttgtggaggaatcatctccgacaacgacgatgaattttttttggccgcaacgcaaattgtgcatagctattggcactctgtcaatgcaccaaaacatggcggttctatcatgggtcatgaatcgattgatcgcaacagagaagcacacacttgagaggataatcctacctacggtccagttttattcaagcgcggaattgtattaagccaattttttttgatttatcttagctatatgctatgtctctcattagttatacttggtaggaatagaatgaaccgacctctatttctctgcacaatgaatgcaataaaggatcacgatgactattttgtgcagaagagaaatgcagctggtatactagtttaggcaaaaaaaaatgtcaactataccaatacaaaaataaaatctcggtaaagtataggaaactagcatgtaccatttgtctagttgaataaaatatagtttcagtacaattcattaataaaactttagggtgtagattaagaacaaatgattttatcattacttctttttagcacctacctagatcatcacagcaacacttgcactgcatcattcaacaagaaatgactactgtgcatgatgcactacctatatatatatgagtcaacctcaattgaactcaaagggagttagatccatggagagaaagagaaaagaaatgatctattactctgaaattacctaaaaattcagtagcagcacacgtcatcgaggtggccgaagaggcagagactaccgatgatgccaatgaagtggatgatgatggccccgacggcgacttggatgggcgggcaacggtgtcctagatcgacggacggtggcaccctagatggagggtcggcaacgccctagatggacagtcgatggcaacctggttagaggtcggtggcgctatggatgtcgggccgacagtgacctagatggagctgacaacggagctggtgcgaggaggggaaggtgacgtggctcctctcgacctagcgggcgacgaacgaaagagggcgatttgtttcggggaaatagctgtcgcggttggggaaagcatggggagggaaagaaaaattggcgcgaccacacacgatttctgcgattgggagcgcgtcaagttgcccaacatctagttatgattggtgctggttttgggtgtgcgtaaattttaggagccatgtttagagcatcaccaacagttcccccatactcttcccaatatcaaaatttcggtcttttgtgtaaaatttgacctccaacaggatccctactcttcctcccaaaaattgacattcccttctccgcatatctcgttctccacaaatcgggcatccctctccctcccaatttcctccaccgtcgcgatttggtgcgcgctaggggaatcctgcccgtcagaaggtcctcggcgaggtcgtccaccaccgcattgacctgtccagcagccgcaggtgaccccaactccctcgccaacgaccggaaacgtgatgctattcccaagcagccggtggctccatcttccacgcagctggctagacattcgccggtcccgtccatcgccgtaggtgaccccaactcccgcctgctttccatgtcggcttggcacctccctgtcccgtccatcgccgttgtttagagaactgctggcggcggcagcagcggactctcggagtagcctaggagtcggttcccatcgaccacacctaggggcgatctgttgtagctgggtctactgatcgatgttgctgtgctggtgctaatgttgatctgctggcctgccgctgctgcttgttgcttctgctactgtgttgaactgatgctgatcctagaagtagccattgctcgtaatggctggctggctgctgcttactggttatgttggtttgcttgctgctttattggactgagataattttctactaaaatgttgttggtgtgatcgcattgaaatacggatgttgtactaatctaatggttgatgttgtactgagatgttttcttacaagtacaaatttagatggtagtttacaaacattgcaggacaaaatatgtagaagtacagtcgtggcgggggagagcaacgttgtgggatgggaggtgaatgcaatcgtgctgacagcaagtgtcgaggctgatcatgatcactgcgggaggaggaaggaaacatatttctgattgtagttttatagggtctacttttcagtcttagagaattaattataggtcatctcttggagagatgattattttcacaccttaaatttcttttaggattctgaaaaaccaaattttgggatgctgttggtgatgctcttataagtctattggaggcctggttttgatcaaattctcaaaatttatgtttttaggaacctattttggagatgctaccttctgcagccaacagatacgtagacgcagtcgttccggtgtgaccaagccgtaacggtaacattatgcgtccgcctttggtccggtgtgacactgtgaccccgccgtaaccccgtaacggtaatattatgcgaccgccaggtggggggccaaaggtcgttccggtgcgacccaaacccggtggagagtcccacacgccaaagccgcagcagcagccgcaacttgcggcggttccaacttccaagcaagcaaagcaacccaccccctccgccgcc

SEQ ID NO: 51162 - DNA, 3000 bp, Oryza sativa
ctcttcctccaactccagctccagtggaagccaaccatggaagaagcaacgtcaccaaggatgttcataagtctctgcttgttcccgtttcagctgccaaagtgcataatcagaagcctgcaccctgggaccaagcaagtcgatcctgtcgcaactgtcgtaagccaggacattgtttcagtgattgccctcttccaagagcagcaaaggcagttcgtcgtgattcacaagttaccagcactgcccatgacaccaatcgacacctaaatgtgcaacctccgccccaacggattatcgtcaagggcaccgtcaaaggtcgcattgttccaccggcaatcgtttcaagcctacaacaccaacgccagcaaggtaagcaatgccaggagaataatagctcgctacagctacaaagaggcagtacactccttcgccagcacccgcggcaagcttcgtcagccccaggtcacccagcagttgtcagctctagcaatgcacctcgtattgctccaatccaaaggcccatcggcaaatcaccgctcggtaaccccgcgagcaagaagttcctacctgctgcagctgtcaagagagttgttactccaccatcgaagatcaacaagcagagcaacattcccggtgagacttcagccagtaggaattaaagaaacaagtcggttaggttcgaataatggaagcaatagcagtcctagccaagccccctacgtttcaagttcagcagcagtctacaagtgtttaaccttatagcacttctctctgtacatagatgtttatggcagttatgtaatgaaaagggaatattgaataaagtttgagtcagtcagtttctcttcttttatgattcatcttgagcatgcaaaagcaagttaaaatgtgaatctgtcggtgtcacaagaaaccaagagtttctcttctaactcatcgcaattctgttgaagctccaaaacctgtttgcgagcaaatagaggaatggttaactagcagattgaaaatggttagacgctcaacacccaacatgatgagatctctttaaaggcagtatcaatggtattcggatgaaaagagtgatggaatatttgaaagtgacatcatataaagaatcttgggaactcctctaaaccttggaagccgttagaggatggtaagcggaaatttacaccctagtggtgcgatcatggatcaattacatttttccttagttcaagacagccagtataagctccaggaatcatctcaatgtttctcagaagttgaaaaagaaattgttccatacctgggtcagaagtatacagagtcaagtccagaaatgtgtagttagcagggtatatggcatagaatcccttttaacgaatcatctttaccgaagataggaaagcgaagtggttatgatcaaaaagcagaaactctcggcagtatcaaagtcaatttccggcagtcgttcagattgtagtatttttgggaaaacaattgcagggcctatagtccgtaaacccaggaagagtcagcaaaggacgatcgacgaagtgtaatgtcatgtcaagagaaggacttttgagtttgatctgttaagtgatcagtgggtatgcaatctatttaggcatacgacaccgaagtcaggctagaagcgggacagttatgccagcagttcaattgttcccagtcaggcgaaatgtatgactactcctgtaaggggggtaggtcgcagagatgagttctggctcacctcgtcgctgtttcagttgaaggagccaattgcaaggtgtcatgcagaattacgccggtcctaggtcacttgatggaattctgagggacaccggtgaggccaggtcaacagcttagcttagagaagcaacagtgaggacagttgcggttcagacgaaagacaggtcaagcaggtttcctggaattacgtgtcactcgagtcagaacccgttcaagcggacgtaggatcaatgagttacaaaggtcagatgcaagcttcaggaacaacttcatcctcttcgagtcagcatggtgaattgtcaggttatcaaaattgctaacctcaacaattcagtccaagataagtaagttccttaagcatccacagccctgtctgggtcagttgaagtagaaccagtcagtccagtcttgcaaagcaaaggaacagaaaagttgaatcaatcagttcagtcgtgcaagtctggacaatcagtcaatcagtcagttcgagacagaaagggggcagtgcagtatgcggatccgtccgatcagtcaaaccgcccgccagctccagctttctttctagccatcccagaatctcgggacgagattcctgtaaggggggtagatttgtaacgccccgattttcgttcgggaataaaaatcaattaataatacattttctagaaattaaataaaagttaaaccaatttaatcaagtggaattatagaggaaatttgaaattttcctttaaaaatcattggccgggaatattttgtaatattctttgcgccctaatgtactctccggaattttccgtgaattttcggagctcgagaaatagttttaatagcacaaagatcattgcatcaattaaaataaaaagaaaaacaattaaaatcccccttcctctctttgggcctttttcggcccaagtcttcctaccctcccgcggcccgcgcgccccttttctctccctctcgggccggcctcctccctcggcccgctcggctctctctctccctcaagtctgctttacctccctcgcccgttttcccctctctctccccgacaggtgggacccgaggccccacctgtcatcttcttccccaacctcccgtcgccccaacggccgccatggccgccggtttcgccccacgacgccgcggttcccgcgcttcaccccgccccacgagcgcgtggaatcgatcccctccacctcctccactttttcccccactctccccgtgaaaatcggcgccgggttaacccctccaccaccc

SEQ ID NO: 51163 - DNA, 908 bp, Oryza sativa
tccccttgtttcccgggcccggcactctctccctcgctcttccccacgccgctcccgcgcgccgccacactccggcgaactccggccgccgtttcccgtcactagggtcgccgccgccctgctccgccgccaccgccagctttgccgccgcccgggcaagctcggccaccgctccatttcccctctccacctccgtagcgccgtagccacgcgaaccacctctctccgctgccgcccccgactccagccgcgtcgcgccgccgcttcggtcgacgccgaccagcgccgttgcctccctcagctccgcaaggacgaggaggacctcggccgccgcccctcttcgccggaaatccgccggagctcctccttcctcggtcgccgatcgaggccgagcccgtccgccccatcccgagcgacgcccgtcgccggagctccgtcacgtcgtcttcctgaggagccccgtcgccaccgttccttgccgtcggccgcccctttgccgtcgtgcatctcggtgagcactcccctccctctcccttttcctccccttcgtcggccgcctcccgggcgtcctcgcgacgcgctgccgccgccggtggccgtccgaccgggtcgacttgcaaaattcatctaaaattgagctctacatgtttgtttactttttatgtactgtttgcttggtttttataagagtttttcctcgttttgcgtgccagcgtgtagttcccgtcgtttcggaagatcgcggtcgcaaggataagagttcggaagattgtttgaagaagcaaggcaagtcacacattccccttgagcatgttgatcctaatttacaaatcttttactgtttgcaaataaatatgcatgttttgctaattacacgggatcagggtttacctatctgctcgcttgtg

SEQ ID NO: 51164 - DNA, 621 bp, Oryza sativa
tgcgggggaacggtccgcctgtatacaaacgcctattttcgcaagcagcccagtcacccgcctatgaaaatcctctggccggatctgggaggggaggggaggggagcagcgccgtgtgccgccaccgccgccccgcgcgttgtcgtcgccgaccccgcgtgtcgccgtggccgtccctgcgcctcgccatccccgcacgcgcgtcgccgtcgccgtggccatccccgccgaacgcccacggccgctaagggggagggagaggagagctgggggctgtgagggagaagagaggagataagacttagaaaaaaaaattgtgcgatttggcgcctatttatatgctacatcaattttggcaggcggaccctgcagatataaagggttcttttacagacgcactgcttaggtggtccgcttgcgaaaatagattttcgcaggtggacaaccatctcaccccacggttgttattttcgtaagcggtcatttagttccgagaggtctacccgccttcaaaaataaaatgccatcgtcgggaaaattggtcctagtagcgtaattttccctcactggatcaaagtaagtgcaccagaggctcacaacttgcattcaagaaggccactt

SEQ ID NO: 51165 - DNA, 600 bp, Oryza sativa
gcgttcttgaccgtgccacatcatccaaaaccacccttaaactgtcttaggagtcaatctataccggttttatcaatttagggagtcgttttatccggttttgtcattgagggatatgaatcagatccagtctatatttaagagagtcaaagtggacctattcctttaaaaaaggaaaaggagataggctaagctcgaatggaaattactgtatgcccaaaaatggaaatttggctgatcgcgtaagcgagtggcacgctaccgctcgcgcaatggtcttctcggtagacaacagccaatagcttggcagggattttgtgttagattcctctgcttggatatgcgaacttctgggccgaatttacctacatatttgggtcaaacattcaatcaattttgggccacatttacgagtaactttgggccaaaattacatgcacatatgggcaggatgacagctgcaaaacgtatggatgaattccatgcatcaaactattgactatgagaggcaacaagtccctctcaaaaagagagagagagagaggaaacaagtaatttactttaatttattttgtttagatagataatagatattttatt

SEQ ID NO: 51166 - DNA, 746 bp, Oryza sativa
ttttatatgttagctgttaatttttcttttcaatctgtaatttttctgattttttatgttttttatttcgatcttctttcagatggatagtacttacgtattttctctcgtatagaaatgtatattagaagtgagagattatattttaatggatctaataataatctaatggtccaaaataacgaatccagagtttaagtattagatgttttacctttttcttagaattctctaattttttatcgcatcacatgacgatgtatgagcgttcgtagaaagccacataatggcttaagagtgtttgtaggaaatttaatggacttttagtaccggctaggagggaagggtgaaggagatttattttttatctaatggttaatattatcgggtccaccattttaaatgaaaactgatggttatatattttttttcagaatttttctctaatttattagaataccatgtgatggataagttttttattttttcgtatagtagatctaatttatttatgcatgttttgtgaaatgatacattatcatgtttttctattttatataataattttaatagcatggatatgataaaaactaaatatttcttacaagttaaattacagattatattgccttttgaatcgttaatggaccacaatggatagaataatacggaagaataaaaagttttatgtgtaattaaaaattaaccacattttttataaattatggttattttaaatttattaa

SEQ ID NO: 51167 - DNA, 793 bp, Oryza sativa
caatgggccccgaaacccggaacccgacgggtaattactctattaggggctgtttgtggttcagtttttgtccccatgggtctcttagcgggcaaaagtgtcacccgtcgggtggagcgggtgcaggtccgttatcttgcccccgtacccgttaacccatggggctgatatgcagttcttgtttaataggtggcccatcagaatttcgtttcacatgcattgtttggcccaaggcccatgcggagaagagctctccagtaaaaatcaacgcaaccctaatctcattcctaagtcctgaccagccgcctcccttcctcgtttctcctctttcctctctcatctcgctgtagtccacacgcggacatgccgccgccgcctctgcactgcgccgcctgcctgcctgccgcgaccccattttgtccgccatccgtgctgcacctgcgcctcgatgccagccaatagatcgacgaccggcggccccaggcgcactgcgtgctcgaccacgccgcttcctcttgttctgcgctgctcggcttgctgtcgtggttgttgctgttggggtttgaaaacccgttggttccccggaaccgtttccgggaacgggaacgggaacggggaaattcaccattcttgtccgggaatgggaaggttgccgttcaattttttttcttccgggggtgggcacgggttgttgccacccaacgggcccagcccggttcccatccctacccataaccaatggccacatcgtccaggtgcgctacggtgacacaggtgcgggattgggaggagg

SEQ ID NO: 51168 - DNA, 514 bp, Oryza sativa
cgtcagagccatcaaaacgaggcaaatccatcttacgcaaacaactcttggctcgcagcccccttcatgggaagggggcgactcgattcagtgccatcccaatgcggagcagatttcagaaatacaagaagtggaggcggcggtggaggtggtgaagcacccaaactagccatggagagagaggacggggaacccagagtactcacttggtcacccaaggcatgcttctgaagacgcgcagcctgcgcatgctcctgctgcaatttccccacagattccaaagcgagatttactttggtggccacctgatcaatccagccgccgtgcttttccatctttctcatcaatagcctccatcctctgagtgatggactccagtttctccaagagctccattgagtccagcgactgctgcaatggagcactgagtttgatgggcgccgggtgccttctccaaatcccaccgaaacagaaccgaacttacagcggccgcacgcaagggtagccaccaacc

SEQ ID NO: 51169 - DNA, 801 bp, Oryza sativa
ccgactagaaaataacttgtctttgcttatatgtaaaaaaatatatttaactacagtagcaaggaaattccatttattactatataatatgtctgttttaattgcatctgtagatagaaggacgtgttatggggattggtcatccagagtatgcaagcacaatgtaccttcttggcaaggtactgttgctccttttatatttatattgctgctgtatatcgtgctctacattatagactcattaccttttgtcagtaatcttgcttgtgttaccttagtcctgttcctttcaatcagggtggtactagcagtattttgctgtttaagctattgttgtagtgtttttatattttcattattttgtgactgcaatcctgcggcatattgcctttccaaacctgcacattccagctgaggatacttctgttttgctgtttaacctatagatataactttttacttttttttttcttgtcaatgtatcagctcacattatcttcctttcttttgctacatttttctgtaagtaatcattgccttttgtcgagaaccaatcagactcctagtgaagacctgaattgtactccctccgtccaggaatatgggggattattcccaatctagcacaaattaaggaagatgaaagattgcatctaagacatccagcaatacacatcggcacattgaatgaactgcacaatgtacacctttggggattaaactattaaactttggcaggttgaatggtgtggagtagcactagtacattctctgtatttcttttattctgacgggaactgg

SEQ ID NO: 51170 - DNA, 651 bp, Oryza sativa
ggtttcgttggaccgggcgcacggccgccggttcacgcgaagggccgccggagatcgaaccattccaaacggaccgcccaagatcgatggggtccacgccggctcacgccgaacgactccgatgacgtcagcgatgacgtcaccaccgccgccgccgctcgccgggttcgggctcacacgctcgccgccaaccgccggcgcgccggcccaaccgaaaacccccggaatgaaccggccgccaagcgaacttccccgttgaccaaaggaccgccgaaaaaccaccgaacacccccgccaacaagaagaaaccgccaaacttttcggctttcagcaggcgacggccgttcggcggttcacaagcgcggccaaaccgccgaccgggaccgcggccactttgcgattccgacggttgcctttccgaagtgaccacgaccgccgtaacgacggcggcgcccggctaaaccaacggcggccacggcggcgccaaaggttccgaaggtaaggccgttccccacaccgccggccaaagccaaggaagccaccggtaaaagaaaaccttggggtccttaataaaggggcaaccaaccgccaccgaaggcccacgccgcccgccggcgagaaggaaactttagggtttgggagagagaggaa

SEQ ID NO: 51171 - DNA, 695 bp, Oryza sativa
cctgcaccccttctcaaattgccatcaacaggttagtgaattatataatatctctctaacacttgaatttaattatgtacctatcggggtgaatcctcccatcgaccaattgggaaaaaattggaaggttccctttaattttcttatttatatgtatcaaaccaagtgatttaaatgtcctcattctcccaatgtccttcttcgccctggcctaggggtaaaatttcactcctctaaaaccacccacatttagttggtcactgtttctgtcccgttgtgaggcatcaagaatcaataagcatttcatcatcgtctttgccatcaacgcacagatctctcgtaggccctatgcatgatattcacgtcatgtggccagtggcggagctagaaagtttccacgtctaggactgatctaatgggaacttaaatattttcataaattacatagtatttttcaagattataatagggattatggagctaggcatggggcccaagccctagctgccctatgcctgattccgcccctgcatatagcctttacaattttcaccatgtatgtggctctctcttgatgcaccacacaacatttatttgactgaagtgccaatagcccatgcataggagaagaagagatgggacaaagtcctatcaatgtgagaaatattatctttccttcatccttatgcaccact

SEQ ID NO: 51172 - DNA, 758 bp, Oryza sativa
cctgcacccctatggaaccaaaggtaaaaaaaaagaattaacaaacaacgcagattaggaattaaatggcttttgattaccaacttgcccccctccaaaaagaccagccagtcccaaaagccgaagaacattttctttttggttttccccttccgggccccccggttaacctccaagggcttcccctcccccggccaattccggcggaagaaacctccccaaaacttattccaattcggccaccggccgaaccgccggggccgccgccgccatgccggaccgcttcgccggccacctcagcaagcattgcacgcgatgcagtccatcggcaggtcgcacatgcccgtgccgcggccgccgccgccgttcgactttcctctgcatgttggatatatgtatatatcgttctcacgtctgcccttctgctgttgttgaagctgcttggcggcgagaggtggaggatgaatggcaaaatgcgggcatatatatgcatataaatgcttgttctgtggtaatgaaaataacatggtgtcgcgaccatggcgacacgcagagctagtcacctgcgtcctgtagtttctgttttcattgtaagcgaaggacgaacaagcgttcttgtgttaatcacataatgacgacatcgtgtataagagcgtacatagaaaggttgacccaaccggtcggtcggtgaagagaccaatgatgactagctaatactccctccgtttcacaatgtaaatcattctaacattttccac

SEQ ID NO: 51173 - DNA, 661 bp, Oryza sativa
aaaaatcgaacgccaccctccccatccccgcacacgagtgtagatttcccccgtccccgtccccgtccccgcaacgggtacggggcacccaccgggtctccacacacaacagcaacaaccacgacagcaagccgagcagcgcagaacaagaggaagcggcgtggtcgagcacgcagtgcgcctggggccgccggtcgtcgatctattggctggcatcgaggcgcaggtgcagcacggatggcggacaaaatggggtcgcggcaggcaggcaggcggcgcagtgcagaggcggcggcggcatgtccgcgtgtggactacagcgagatgagagaggaaagaggagaaacgaggaagggaggcggctggtcaggacttaggaatgagattagggttgcgttgatttttactggagagctcttctccgcatgggccttgggccaaacaatgcatgtgaaacgaaattctgatgggccacctattaaacaagaactgcatatcagccccatgggttaacgggtacgggggcaagataacggacctgcacccgctccacccgacgggtgacacttttgcccgctaagagacccatggggacaaaaactgaaccacaaacagcccctaatagagtaattacccgtcgggttccgggtttcggggccca

SEQ ID NO: 51174 - DNA, 4436 bp, Oryza sativa
caggacacccccggactaaccggtcccataaccctggtctgttcagcctcctccaaaaaagtaaaggatcaaagccactaagtgcaatctcaacgcatatgctctagtgtagcctattgacacctcattgccaagttgccacccatcttatctttagtacaacaaactagaaaacaaattaatcaaacatttcgatcggcgataaaacctcgatagacaaatagactagctttaccgtcttccgtcattcgccttacactgtcaaattttaatccatggtgatcatccttgacatactcgtcatgtggtcctaattcaaattatctcacgcaaataaaatggttagtgtacaattagtgtttgtcattaattaccaaaatcaacgatcggggcctagatactttaggaggcgacaacctaaaaggtttggggatttatcctatcccttgacctaattgatgcttttatatttgttggtgtgtgttaatgggcctaggcttgcacattgcatcgccgctaggctaagggttactgtcacacacctcatggtctacatatcgactacaatgaccttgcaacactggtgagtttcggtgcacatccatattaattttgatatgcctaatattggccaactgtcggttgttttttatgcggttatcatgtactgcttttaagttgcaaggggttcaagacattgagtcatttgcaattttaggttgagacattgagtcattgattcatttgcttttaagtcgagacattgagtcatttgcttttaagttgcaaggggttcaagacatctcaaggcaaagggctcgggggctactgtggattacataggacccagtatcatcataatgggccttgcaatatgggccaacaggaggtaaaccaggtagtagacccttgttgtcggttgtacacaaccaacttgtaactccagatatgggaagataagtggtaagatataattctatctatcccaggtaacatgtggagagagataacaaacgattcagttaagtttggtaagccagatcccttaaaatttggctctccatgtctgtctaaggggaatagaacacccctcgtgaggatagagataagcaccatgctaaaacacatgtgtgtgcttttaagagaaaatttaagaaataccattgacaaacaccaaattccaagaaatatcatcgacgagcgcgagttccataaaatgacatcgtacaagcgatgttgttctagaaataccatcatcgttaaggttactgatggaaccctaacaacgatggcatttctaggataaatagcttgtacaatgacattatatggaactcacacttggcgatgttatttcttggaatagagcgcttgtcaatgatattttttggatttttctctacttttaaataacaaaacatttcattgatttatgaaaaaaaatctagcccccccctctatatatacacactagaaaaaaaaatgtccgtgcgttgcaatgggtgaagactattttaatcttattattattattattatacagtttagttaaggtgaaattcactgcgggaattcgcttggatatatctctatattttttttagaaaatcatgagttgcagttaggaatccgattgtctcaagttaatatgcgagttttttaaaagagtttcttatacatctccttttatatttcccaaagcgaacaaacttaaaaatcaactcaaatacggagaaatgatcggaacgattgaggaaagaaagagaatggcggcccctttcctttcgcactcatatatggatgacgtaccaaagtaccagtaaaaacatcttcaactttataataagagataatatcaaccaggaatacaaaactaaaaagggaaaaaggaaagaaatgaaattgaaaaaaaatcctatacagattgacaaggtaaagcattgactactccaaacaaaaagaaacatggattaagtctataaaaatattcacaaaacaacaccttttaagagatcatcatttattttccggtgatcgaaattgacttggacgtgtattaaagtggggataggcttgactactcctcaattttcatcaatttccatttccgttagtatgttttttaaactgaaaatcagctcattttgctaaaaactatatatataaattactttaaaaatcaaataaatttatttttaattttttcaataattaatacctgactaatcatatgctaattatgtttatcattttacgtgtggctaatcaggattttcgatccctttagaacgtcaccataaggtcagtagccttagaaaacaaaaggatgtatcaaatccatacaaacaaaacatatatatatttacagagaatttaccgtgaaacaactttgtcctcaaacagatgccagttgccacccaccgaaagatacctgtacgtcgtatgtactactggtaaaatggcacctctctctctaaaaaaaggaaaaagaaaagataaagaacgaaagagatggaaagacggtaaagccgaggaagagacgacggaagagaggcatatgggtggtggacgtatgaaacgaaatcgtcgcgtaaggcgtagcgaccacaaggcgcgctatccacacttccacatggaccacaggcggcccaccctgccctgccaggtgccaaaaccaaccttcggcgttgcggcccaaacgttcgttttccttcgccagttcagctcgccatttcgccatggcccccgccgccgcatcatcgtccgcgctgctccccgcggggaccttctccaccgcccgccccgtcgcgggccggcccgccggccagcgccttcccacgagggtagccgccgcgagcaggacgacgacggcgcgttctcctgccgcctgcctctccgtcgggggcaggaggcggggagcggaggccgtccgcgcgtccgcggggggagcgccggccgcgtccctcccggcggcgctgctgttcgactgcgacggcgtgctggtggacacggagaaggacggccaccgcattccttcaacgagacgtttgccgaggtccggttccttcagccccggtctcgctaattttggtttgatgacgcgtttggcgattgctccgcaggtctaaagtgttggtgtcgcttatgtttggtaattactggaatcgacgtcttgttgttcacggattaatttgtttctgcggagtaacgaacctaaatcatgtgaaaatgttgagtagatgatcacctagtactagtaatattacttcaactcggatcattggaatgcctaattcaaattcattgattgcctaactgcactgcaatttacatttaggggctgtttgcttacctgcagcgcaatatacatttaggggttctttgggagaatgatttttatctctcgataagtagtgatcaattttaaaattgagaaattctacttctacaagttgtaacaaaaaggaaaaatcaagctgaaactattatacgtggattcacagttatatatgttacaacttgtaaaagttgaatttgattttcatgtttgtatagtgatatatcacatattaatatacattcaagaaatgaggggacatcgacacaaacttttccctgttgtttatccgattaccatattttaataaataaagtcaactatgttcaattgttctgtttatttcattggccatctctgtcgctaagtaaccccatttttctagcacacttccgaaatactcagtctcaccaaaccttgccatagctgcagtgagcggcttcttcaccacaagtgtgatttacctgatatattggtagaaataggttggttagtgtggccatcaactatggagcatatccagtgaaaacgggctgtgttgaagaaggtacattgtaatttcttccacctggacacctagttcaagccgttgttaatcttccttaggtggaaatgaaagagcgacctgggatacctgtacttacaatagaaaactgtaatacacttttcaactgcaactattgcgttaacacaaaaaacaataggcagttattaaaccttttttttcttctttatgatgaaccgtggatgaaaaacaactgtcaactgtaatacatatgattttatatcatttaaagggtacctactgactgaaatatcaaactgcgtgttttgttgtttacagagggaattaggtgtgagctgggatgttgagctatatggagaattgctcaagataggtggcggaaaggaaaggttaatcaacactttgctgctttctttcatttgttggcctgccaaaatcctagccattcatttgcattcttcaatacaaacaggcgtttcctcgaaacatgttttgaaaatgtagtttgtgcccatataggttatatctatactcctttaaaagaccccaatagtggtggtgagtggtgaatct

SEQ ID NO: 51175 - DNA, 3694 bp, Oryza sativa
agtctttgaatcccacacaaagaactgcccttcttccgcgttgctgtcctcatttaccatatctcatgttgggtttcgcttgtatcatatttgctaatggtttcttggtgaggtagccagcggccagcggaggcaatgagccgatgagggaggcagctaagcgaagaatgaatgtgttcagatgctgctcgatgcgaaaatggaggtatgatctatagattcagcagtgatttttttatgcccgacttatcatctgatcatggattagtgaattgcatcattggtacttcatgaaagaaattgtcgaggaagacttgggagtgtggtaggttgcagggaagaaccgcatgttggtgaatgagcttgaagcgttgaatgtgtattgtttttgcatccaacctgaaagatgcagatttttgcctctgataagtggaatgcatttagttgtttttttgtccattggatcgacatatatgaacattcagcagtaagaggtccttaagatggccacttgatgacatggaaaccctgttggtgcgatcaacgttttgacgagatctgttgctcttcggaaaagagaactttttgaattaatttgcttatccgaaagaagtgtgttcatggttaatatgcatacctttgagcacaaatgacttatgttaagggttgattaaccacttttgtacttttttttgggaggaatcatttatctacttgttacactggtaatacttgaccattaactgaaaacatgcaatctgctttagcatccacttctgaattttatatgtgaatggatgcagaactctgctttagctaaccatatgattcggatttttcttaaatgatactgctgaatgtgatttggtacaatgggatgaggcatctaattgtattgcttcaaatggaatggtgttttagataaacctcagtatatttatttttaggcaatagcgtggaatcatgctggaattcagaataaaaagcattaggtccatcctggagtttagaataaaaaccctctctctcaatattgtttctcatatgatggcaagtagaataaaaacctcctctcccaatattgtatctcatatgctggagtttatattaaaagccttagctccatagcttctggtcgtcatttctgttcacctgttaagatatcagggttcagacttcaacatggtttcattgttctaggtctttcaggctatttaatcaataaagtatgtctatgatcagattaaattgttatattttactgtgattagctgtccttttccttcatctgaatgttttgaggtacttttaagtttcataatctaaaaatgttttgcggttcacatcatagtagccttcactaaatgtgaactgccagaatgttgcatactaaataattacactgattgttccccctgctgaaactagatgagcattatctgaatgttgcctttttatgtgtgatgtttctccaaaactgaatgtgaatccattatcgcggaattatgtcagtcccattttacaaagcttagatttaatatgatccagactgaaactcgattcacctcagttgcaaattattatgagttttattgtatacatccaaatgaaaaattagtctcttcgttccagtttgctgtcctgcaatacacggcgcacatttggactaacaactcttttcatatttgtgcagtttgaggtggtgatcttttctcctgaagataaaaattaagttttttacgtaaaacgaggtggtattaacatatgattgattgagtttaaattattacaaacttgaaaaatagattaatatgatattttagagcaactttcatatagaaagtttccgcacgaaacgcaccgtttagcagtttgaaaagcgtgccacgaaaaattttaatcttcatccaactttcatttgggggatactgatttttattattggcctttatttattgttcatgcaagcactgcgtataagaggaagccataatgcggttattactagcagaaatggtaatgcatgctcaactaacaccgttcaaattattccatcaattttaggtgcatagaaagcaattcaatcctgataaacatcacggtattcatctggttgtttacatgcgcagcaaggacttaagggatcgtttatgtatcatcgatctgcgatgtaataatatagattatttaccatgtcattcggttgcttaataaaaatctgtgtatgtaattatcacaggagatatagtagtgaatgatcaacaatgtacttgttctcatagtaactttgggttgttattgtctctaacacagaagatcattttgccaataataactgcattgtgtatgcttgatttccttacatggccaccctgtatccagattaatcaggtattcttcacttgatgttaaatattggttaccattaattattttctgttatccagatgcaaatacaagtcccagagttatctgccatgaggggttaagaataaagtgaaaaatgttgcttacatgatgtcctcatgattttggtatattttaaattaactgtaatccaccactaacatgctttgtatgtctcatttcaccctatctacgacacttgaattagaatcatgcgctcgtcatggatggcgggtcagagtaaagcaaatcgatcaattgatataatagatctataagcagtttgctttttattcgttatttcctagcataactacttttgtatttttatattagtattttgttgttccctaatatcgaaaattcggatcgggcgctctcctcgcgcgctcaccccccccccctcccaggtgctgcatgcaggccctggctccaccacgtctcggctcctatctgtcattgcaacaaatcactaacgtattttggaaaccctttattaagggaatttggttttttttccaccaaaaatgtttcatctaatgtactcgcaatgtttcactatatatagatctaatgttgcaatgttgcagtgaactgaaatattccattgcaacaaaaaaacccacatattttggaaactccctattaagggaattcgtttcattttttgttccaccgaaaaatgtttcacctagtatacttataatgtttcactatgtatggatcaaatattgcagtgaactgaaacattctttcgttttttgatgaaacattatttttatatgaggtgaaacaacacccgatttaaacgagtgaaacattttcgatctacttagtgaaacaattccgatatacctgatggaacatcgtgcaacatttaaaaataattcaataataacttgaaaaaaattcgtcggaatatatccatgtgtggtcttgttttgaagatttaattgcaacgaatttaatggtgcaatcggatcatgatttggataagtaatttaagagaaaaatcagtttaaagtagttttgtacgtaaatcggacgttgacgtcatgtatttttctccaaaccgactgggcgcccgatccgtggactcgtccccctaatatgtatcaaaaattttggtaaacgatttctgtagtgactagctatatataagtacatggtaaaagttattaagtttgtgatataaggattattgcctattttgcttgcaatggaagtggaaacaaatggttgaatatatcttgcacaagtccatttgcaatgccactatgccagttca

SEQ ID NO: 51176 - DNA, 1972 bp, Oryza sativa
cctgtttgttatagctccaactcctaaatttaactttaggagttgggtttagagtggagttgtgaagctgtctaaatttcattttgtgagagagctccatccagctccactcccagttttggtggagctgaatctgtttggctgagctccacgagtggagctgtgccaaacaggcctataacttaatctaatacttccttctcccaaaatataactacctagtacgggatgtggcattacctagtacagtcctgtccaaattcatagtactaggtaatgtcatatactgtactaggtaactacattttgggacagatgaagtattgaattatatcctatctaatactccctccatctacctttgatagtcatatttcatcttggcacacagatcaatgataagtaattctacttatcatccatttaaacatgctactagtcattcctcgtaaacaagcgattcattaatatttacatttcacgatgctcaagtagccaatcttgtgtggaagaatggagagttatgcattaaatccgagaaagtcattaagatgataggttgttgaattgaaatatgcctatcaaaaatagaattttcagatttgaaaatataactatcaaaaatagatggagggagtattaggtcaggtttctatggaactgagagattacgttttaatttattatcgttcccacaaatcttatataaaagattttctctaacaaagaactctaggagaaattcaatcctatcaaaattcctattaaaatatagaaatttgcaggagttctaacatgaacttaaacctcttaaaataaatcattcgtgtatatctttcttctctgattcctgcgttttcccgcgctcggtcattcctattgtttacaagcatttttcaatccataggatttgagtttctatgccactttaatcgtgcatttttcatgtttcctgtatgtttgagaatcatgcattccaaaggaggcctaaattagtcttaggttgtgttcgacagctgaggatttctctcattctcctcgtgcaggcatcctgaactactaaatggtgtggtgtttttgccaaaaaaatctataggaaagttgctttaaaaaatcatattaatccttttttcaaatttaaaatagttaatactcaattaattatgtgttaatggctcacctcattttacgtatcttctcaatcttctcttttcctcttctctcaaatgcagaccccctttgatttgaatgaaaaacataagaattttgtagaattttaattctacatgattttttttctatatagcccttttcaaaggattgaaaagtatattaaatactactacatccatctcagaatatagcaacctagaactgaatgagacatatcctagatgtatcgtagtactacgattttggatagccctctatcatcagtatgaaattcctaaggaatcctcaatccatacaagttttataggatttttaacctagaggtccaaccacatgaaaagttcccttttagtcattctccctcatctaattcttgtgtttttttatcacagttgaattaaacgattatttctatattttttacgtgtttataatcatatattttacacttgtatttttgcccaaattctatggttttttctcttcccccgttttatcaatcttgtgtttcaaaggagctaaaagtggtgtgataaaatacattgttatactcatctatctaccctatagttcaccaattgtgtcttacattcatcatttatcattgatcggtcaggatcatctcactcatatccaacgcccctcgtcgctcccacctcccttctctctgccacaaccccccccaccttggatcgcgatctcctctgtgtctctctcccatcgctcccctctctcccatgtgtcttacattcctcattactcattgatcagtcatgattgtctcagggctgcaggaatt

SEQ ID NO: 51177 - DNA, 1812 bp, Oryza sativa
tctaccacaacctccactcccacgcggatcgtgatctcctctgtgtctctctcccatcgctaatcgcacaccttcccttatctctcttagccaccaagtgttccccttactcttgtccataccaccctcaatctccacctatgcactcgtcttcgcgtcgcccctaatacgcgctgttgcaacacctaaatctgtggcgccgctctcttttgtgccgccctgatccgcgttgctagatcactatcgctgtggccatcgtcgcttgcctcttcgatctcctcggcaccatcataactccgttggtcaacctcgccaatttcctccgcgccgctgacgtcggatcgtcgccattgccatgcctcattgatcccctccgacaacgcgatgtcactgccgcctcctctgtctcaagcgccatcgacgccgatccgtactcacgccaccgcccacggttcaccaccgtcacccacaaatcgctgtcgaaaaaaccttgacatcgtctcaggctccggcaccaccattctcgattgagggccatgtacaagttcatcttcccttcttcctcagccgctcggccccctcccctctaccacgccccgatttcttccgtgtcgaagacagtggtccagtgctcgctctatgtcgatgttgacggtcgttacagaccaacttcaaccatcaatattcctaaaaatgataaagaaccggcactactcgcatgcatatttatttagaaataatctagttccacatgtacttggcaaaaaatttgaatacaatagattaccttataaataaaggagaaatggtggaaaatacaagttcaaccaatcagaggtcgacacatggcatacagatggatggaagggcccacaaacccaattaaacacatgtaaatgggcccaaccactatgtcactggaccaaggacccaccaagaagagccccggatgaaggactaggccagggggaccagccaggggtcgccgagacccagggctagcccacctggccctcaattttcatgtgctggtagttaccaaccttccaaggcggttgtgaccgtttctaccataagaaatcgccatagaagggacacttggtagctcaagagagaagatgctcctttggatgcttagaatctctactccccaagtcttgtccaccactatataaagggcactcttcctctcctccaacacacaccaagaaggaatcaagaagaagaagctctccttagctatttacactttgttctagtgctagtggagttagaattagaatagtttcctagttcttcaagtttttcggagaattcggatattgttctagtagcttatattcctcttgtaagactttattctataatgaaactttcttctttatatagtcttggtcctttacttcatttgcacaattatttgagtaccaactctagtctaggcttgtcttgtattaattatatggctagcttaccagagatatgcaatggtattggcttagtgttcgttcgtatgattgctctatgtcatctgcagagatgtagagtaatatttagtaatgtaagcgcgatgcttagattattgaatatcattaagtggtgctatatgccacggaactgtagaggtaggctgctgatggtgacagctcagtacagatattcctccagtgcgtatatagggctaagaaaggttcatgatgcgagtactcctccatatctataaccaattggatggccatgatagattatcgtaaggaactcggtaatcaggggtggtttctcgatataccaggagagcatagccaggggatt

SEQ ID NO: 51178 - DNA, 1685 bp, Oryza sativa
acccagccaaaggtcagttttcgtttgatggactgatcatgatttaagcaattaatcacacacttggtcagtctcaaccaaaacaattaatcaaattgggttgtccacttgattttatgggaccgttcattggtataaaagtgatctcatccccagacaacaaccaacaaccaccccccccccacccctaccacaaacacccccaattgtccacggtcgaactaatcctcccaatcatctgaaggtataataatatctgaagttatgtatgggcattaggaaagtattttcttcaaccatccttccacattcaatcatacctcatttaaaaaattttcttctcgactttaatatttactaaattatttgaaaacatttatattatagaatagacagagtattctatctatcatacttatgccaataataaagtgggcatgccatactctaatatctatctattatattattaaaggaatagaaaaaggagcctccacgtttgctttcaaggcctagaaattctcacattaatcggagaaaaagaaaaaacagagtacatatagaaatacaatttagaaatagttaaaattcggaattaaaactaaggaatattggaagaggagactggagtccatatagaaatacaattaggaaataactgaaatttggaattaaaaataaggaatattaaaagtagagtatagagtctatatagaaatacaattaggaaataataaaaatttgaaattaaaaataaggaatattagaagtagagtataaagtccatatagaaatacaattaagaaaaaaaaaagaaattcggaattaaaaaataaggaatattagaagtagagcatagagtccatataggaatttaaaactaactaaaatttggaataaacataataaaattaaaagtagagtttagagtccgtataaaaatataatttacaaataactaaaactcgaaattaagaaaaacatgggaagaagagtttaaagtcaatatagaaatacaatttagaagtaactgaaattcaaagttaaaaattagtttagagtccacatagaaatacaattagaaataataaaaattcagaaataaaaataaataatattggaagaagagcatagagtctatatagaaatacaatttacagaaaatttggaattaaaaaaaagaaatattaaaaaacaagtcaatatatataatttacaaataactaaaatttgatattaaaaataattaataactaacacgtatataaaatacaatattaatattacacattagtagttttgtaaagttattgcaaaatttaaaattatgttatcattttaatatatttgaataatataatgagaaaacatactatatgatattatatgagagaaaatataatgatgctagccgcgcaaaaaatatactatatgctattatatgagagaaaatataatgataatagccgcgcaatctgcgcggaccaccatgctagttctctcttaatttaggtgtgttcttaactcttaagtcatggtttccaactttatccctttgttttccgcgcgcacaaacaaagggataaagttgctcaactcttaagtcattgctcaactttatcccttcgagatccaaagagtaaaaaccatccatcgaacaagtaacaatgagctctgcacagagg

SEQ ID NO: 51179 - DNA, 1405 bp, Oryza sativa
actcgccttgctttattaatctctttcacaaaaatattttcatattcaccaatcgtgattagagttaaaccataacaaattgcttccatatgcatctctagtccagagtgcagttaacggacagactttcaatagctagtcagctagaagctatgctgcatcactccaggagaaaatggtgtttatccacaaaattttgtaattgagtgatttcaaaattagacaattcatcatagctcccgtccataccaactcacatcaatccaaattgagcatgcaaaagcacaaactaaagtacactacagcatataaaaatagatcattgaagggacaagaatcaaattttgtgtctgtctgtctgtctgtcgaaaagtgatcgagaatagacaagtctcccagtctaccatacaacttggaactgcatatatatcaagttcgaatccaaattatagctagtgaagcaacaataataatgtgataagaaagtgatctagctagctgcatacaacttccaacctccagcaaggacagaagaaatatgtagccctcttttcagttttgtcaagattgaatgctacatagtacaagatgatttaggcttttgtaaaaagtgtattattttcttgtgttagttcatgatagcttgtcaggtttctaatttgcatctgtcagtaattcaattcatgacgatgtctgaaaatgaattattcatctttagcttgatctcacctatagtctccaggtagcaccgtaggctgctgctcctctgtgcccgcccaacagtggaaccatgacgatatgttcgggtcaccttttggttttagtggtagtttgcatgttgttctggaactgaatttggcaagtgcgttactttggtcagatatatgaacctgaaacgtgtttctaatttggtcagatatatgaacctgaaaatgcacatatgaaaaatatgattgaatggtggtgagcagtggaggacttcttagacacggcatcgtaaggcatgaagcaaatggatgcatggctgcagttggcagattcatcacttctccggcaagcacataactggctaagaagaaagatcacctgaaatgacaaacactaaatcagactatactcaaagaaagaaatcatttagtgcaccaactacatgttatgcaattttgcctgtcttgattctaaccagaaataaatcattatgcaattgccataacggagtgctcttaatgggcctgtgatgtaagcgaaatatttgctactcgggattgattattcattcaaacctaaggtccatattaccactaaacacaacaaataatctgcatctttgatgatcaataccacgattatgtgaacaccaaccaactttgatgacggcaagttatggtggtggggctgcaggaat

SEQ ID NO: 51180 - DNA, 668 bp, Oryza sativa
agaaagaagaatggatcccctctcccttgcactagcctgccaacatggccatcttgtggcagcacaagaggactagcgtctcgattaggacccgttgtaggcctacaacacccacctcgcggtgccaccgtcgtcgccgcctaagccaggctacccacgtcgccataagccgcctgtccgcatcaccgccgcatcatccgtcttgctgccaccaaagctctagccagcacgccatgccatggcacggatgccatcccccgcatcagcctccacgccgtcagttgagctaacctccttgacgttgcccgcaccgaccactcgcaactctgattgctcatcgtgctagcctcccacagttccgccgccatcaggcttgccaccgtacacagcgtcaccctacccgcgtagctgcgcgcctctgcgatgcgccagccctcagccggaagcagccaagtcggcagaaaaccgtcgccactatgctcccagctcctcccatcctgtcgccacctccatcttcctcatctttgtcggtaccatgcgggcatgcctgccttcaacaccgcacccttcctacctcaccccatcgccatgcagccgcaccacgccgccttgttaccgctgcctactcgggagccggcctcctatgccggggaggtcagatacggacg

SEQ ID NO: 51181 - DNA, 641 bp, Oryza sativa
aatatacctatatatatatatatatatatatatatatatatatatataacgtgccatttaactaaatggcactcctcacaccacccaaccacacccactatttgcatggataaaatttttacccctacactaactctcccactcacacatcctgctcatcttcctataagtaatgtttttaatgatacacgtctatttatattagttgctagtgctgatcaatcattccctattctctctctcattcctcatcctaatttttcggatctagcaatttgcatccacggcagcgatgagaggagcgacaccattgacatcgacaaggaggcctccagtgagcaggcaacgacggctgacggaaacctccaatatgcaggcggcgagccggcgatcgatggcgcatccgggcactagacggggactggctggcgtggagcaggcagtgctcacggaatctgaccggcagtggcctccggctactccgctttccgcctaaaccgccggtgttctacgggcctgtttggcacagctctagctccagctccacccctcctagagctagagctcagccaaacagttacagctccaccaaaactaggagtggagttggatgaagctctctcacaaaatatactggagtt

SEQ ID NO: 51182 - DNA, 707 bp, Oryza sativa
aaactgctttaagtttaactaactttatatgaaaaatagtaatattttcgaccaaagataaatttattataaaaatatatttaattattaatttaataaaactaatttggtaatataaatattactatatttgtctgtaaacttagttaaatttgaaggagtttgactttgaccaaaatcaaaacatcttgtaacctgaaacggaaggagtaattaagttcatttccaggtgaatataattcgtatccgtaaactgtccaaatcaagcatccacacaccaattttatccctttgatgatctgaaagtggcgaagcatattttagggcgccccaaataaactgatatcatcacgctgcatgaagccatgaatcatgtgtggcatactagtatccacctgtgctgtatcgtatgcacaaataaagaaacaatatatacacttaactatcactcaattaaattgatcaaataactccgaagtaaaaaaaaaaggttaaatcagtacaggaaagcaatcgattaatagctcgatgctgatcacacgaaccatatatacctacaaatcaacaacaaaccagctgaagatacattgagaaagttcaactaatttgtggccgtacacaaatagagctctaattaattaaacttacttggctatgaatatcctttttcttctaataattaatcttatatccaccacacattattc

SEQ ID NO: 51183 - DNA, 723 bp, Oryza sativa
atcctttttgacaaagcaataattgcattcattatattacacaagtcataaaaaggttgtgtaaagttctccattaccaaattaaaatgtaggcaatgacacaaagctaagcccatactttctttcttctcgtaacataaaaaggggaaacacagctattgatctaatccacattctttacagtatattccatagctaggaatttctaaaaacaaaaaaagaaaagtattttctggtaaattttggcttttggcctttgagtcttaaaagtcgatttttcaccggccctaaaatgatacctattgttttcaccatcgactttaaaacccaaacaaataacgcattatagtactagctagaccctattgacatgcattgcttcttcttcttcttctttttgacatgatggtagtttttgctagtgcaaattcctactatatatgttttcttgacgtggatgtcacttagttaggtttacatcaacataacttacctataataggagttcgtgttaccaaaaactatcgtcatatcaatcaaaaccaccatgaaacaagttttgaggtgttatttgcctggttttgaaagttaaccgtgagcaataattggcttttatgtataagggataattggactccaagaggagttgagagccaaaagttgactttacccttttcttttgacaatcatgagcggttatttctaaatagggctgcaggaatt

SEQ ID NO: 51184 - DNA, 2325 bp, Oryza sativa
cctttccttgtttgttttttcgtttcaggaggtccaactgatgaggttcgatggtgaatgtggggaacatagatcggttgtactgatatcttcctaacgtcggcgctgatccttcaatttacatgtactggtgagattaagaaaatatgtaaatgatccatctagggatggcaatttccccattggggccagggatccggcagggacccgcccccacgggggcgggggagaattctcacccatgggtgagtggggacggggccccgcaaacttccggggatgggggcggggatcggaattaacccgcaggtgacccggaggggccccggaggtgagttacttctctaaaagtagctcattgcaataatataaacccaacaaacccattcaaaattgacatataaaagctcaacaccctagttcccctcaaccataatccttcaaccaacccacacaaccgggggctattgaaattttatcataatattatttagtgtattgcaatatttttatgaagtattagctccatccggtgatgcggggccccggtcacccgccgggtcccatgtggggatggggacgggtgatgttttcacccgacttcctttgcggggccagggccagggatacccgcataagggcggggacgggggcattccgatccaacccggccctgccccgccctgttgccaccgctagatccatcgaataagcgatgttgattagaaggtcatttgttgagagtgagaagatctatactggccaaatgtctaggttttatggctcaaataatgcatgtatatatatatatatatatatatatatatatatatatatatatatatatatatatatatataactggtgctacatagagtatgggctccaagattcaaattgagtatatatccaatttgaatgagtatgaattttttttaaatgtttagatatgaacgttaacttctttactaacaagttcaaacaagtttgaactgagtttgaactttttttttgttagattttggttctaggtatataacatccaaacatataattcgttaggtatgcaataatgaattatgaaataaagttgagtttgagttgttttgttgttaggtatttgtatgaatcaaattcatatacctagatatctacttacaatttgtaaatttttaaaaatttgagagaatttgtgtgttttataccttggagcccgggcaccatggagtgccatatgggtatcctatatatatatatatatatatatatatatatatatatatacacccggggtgtagaatagctattctataccccctccttaccaaggcccaaaacccacctcccacctcggtcaaaggcccctcccaccggtgaaacccgcctactaactccccccaccacccacctcttctcagctctcgtctcaggacgatgcagtaacacgacgaccactgtgcaataacactgtgtcttacgtgtagtaacagcgttaaaatatagttgaaatacagtcatgacgtatctacttttgataagctctttttttctagcatcatggtacaaacggttttaaaaaacgttacatcacttgggagatattgttcttcaaagcttgacttttttgcaatttgtctccacaagtagtaatactatactattactattacttgttactacttgtctgttgtacgttaccacaatcgcatcatgatgttactacactgtgttttactatattttttgagtagtgttactgcataaacacgtggtagcgtgtaccttccgtgcagtaacacttttacttttatgcagtaacaagtatatggttatcatatgagacttttaacctatatatttttgtttaaattcatgatttactgtaattcaccacaatattactgtcaaaagtgcagtaacgtcatatacatgcagtaacactatattggagggaggagaccgattttcttgaaagagggaggaagaacggtttcttgaagaggggagtatatagatgcattttgaagtttaaccctccacatgcagtaacactatagcatcatggtgggaacgattttaaaaaataatacatatcttgtgagatgttgcttttcaaatattggcattttgaactttaaccctccacatgcagtaacagaatgtgtaacttgcagtaacaaaggcatacacatgcagtaccatggttttaccaaatgtataaaattgtttaaacaactcctacatcaatcagacctcgctcaaagccacctacagactttacctgtagcccacctattcgatcttcatctcgtaaaaatgacatag

SEQ ID NO: 51185 - DNA, 610 bp, Oryza sativa
tttccaaatgcgaatgaatttaaaaaccgactcaaatacggatgacataccaaaataccggtaaaaacatcttcaatttttataatagtagagatttagattagatttattattgagtgagagtattcttataatgttcttcaatcaaccctttaccttataattgattaactcctatatagactttgatctatataagtgtgatgtgaattaataacattgtaatctaggtgaaatgctacatcagtatatccgtacacttgcggattatatatgtaaccgttagaaataccgactaatatttctggtaccattgctggggataatgttcgtagtaatgttgttaagaaatatcaacagtcgacacggtgctctatgggtaggctgctccagtcaggtcctgatcctaatcacctgcgagctccactaattcaatctctattctcctttcactatttggtatttggccctgtttaggttttaacttttttctttaaactttcaacttttccatcacatcgaactttcctacatacacaaacttccaacttttctgtcacattgttccaatttcttcaaatttccaactttaacgtggaactaaacacag

SEQ ID NO: 51186 - DNA, 596 bp, Oryza sativa
gcgtaattaggctcaaaatatttatcttgcaaattaatcgcaatatgtgcaattagttattttttagcctatatttaatacttaatgcaggggttcaaacgttcgatgtgacggggtgtaaaagttttttttacgttggatctaaaatttttagtggtagtcttcaattcaaaacacgtccaatcacaagaacagtttaaccatcacatcgaaggtacagaacacaaacatcgacggatccaaactcatcaacctgaccccgaatcccactgccacacgggccccaaatcccacggcccacatccccccacccacaccacaggccgcggatacttcactggattcccaatccgacccaacccaactggcacgccaggcacaccaagtaccccaccaccaaccagggccccacactcccaaactcctcccacccgcacgccgccgttgccacagaagatccacgcccagttctacgccacctatgaacacgcgcgcacacacgccgcgcacatacatgatcaaatctcattcgctcgccaacgccgcaagatcgagcgaaccccagcgaatccgagcgcccacgcagccacatccca

SEQ ID NO: 51187 - DNA, 2058 bp, Oryza sativa
ttgttcccccgcccccggagtccggtgataaaaaggttactgttacggtacatttaccacacgtttgtcactggtgtgtgtgataacggcctcctttttacagtgatcaactgatcatgcattcttcccaagttgatacttgccttactgtgtgtaggtatggggaaaataagaattactgtgccctttattatcaacatttgctttcttgctcttacttcctttctttttttttcttttcattttatttaatcgccctctcatctcacctcgcttaagtatatctttaatttttctaagaaaaaactaaaatgtattttgccattagcctaggcccagtgttaagcaaatcaaaatattctctccttatgttcgaactatttgttttcacttttacctaacatatttacaattttccacattgttaactgttgacagggtagcaaccaaccaattacacatgttggcatcagttcaactatttgatttaagatcggtatcatctctcaggttctcacaagataaggtccacagcctcatatgaaatttaacattttatctggtagggttagctagttatgacataaatactgagggaagaaaattctaaacgtacaaagagaaacagaacatcggagtgtatacacatgttctatcccactgcaaacatcatattgctgttatcactgctattacacctcccacgaatacacatgcaaagtgtatgcgagtgttatcttcttgtgccgtcgatcacaaaataaatgtactgaaatgccatcaaatgcaaagctatgttgtgatttgagatgatccattagcacattgacctgtaagaaccttggatatattgtgactacctacagatgcatggatcaatcttttttagagaatcattcttcaaaaaggtccttgtacatccagtggcggacgcaggatttcgaaggtgggtattcaaaaatttacatggcgaatttgttttttaaaaaatatggttaatatcatcaatgcaaatactatttcttaattagaaaagttataaactatagaaaaatattgaatgaaaacatttatcttgttgggttaacatgattttgaaatataatcgatgtatgcttaaaaaatattgtgagcttatggaagaaaaatccaaaaacaggattgaataatcgagaaaaaacgagaaggaagctaggaatcgaacctagcacctgttgacccaccaaccatttgggcaggatatacttgatgatatggggtatagctactttgtaaaaaaaatgggtattcagctgaatacccatgaacgttgtagcgtccgctatctgaagcctaaactattcactttgtgtacgaagtgatgttcttactatcttcattcactggggttcttcaataccgcctcctgctaacctgcaatctgcaaaagagaacatacataagtctacaatatcattcaatttcaccctactagttggtggctgaattcctacctaattggctatccattttgtgcacagtaactggcacttgtattgcaaattgcaacgtaaacattgtcctacagtatcaaattagcataatatatgcaatcaaaagatcatctggagttctggatgatagacaaggttggaaccttttactttaagaaaactaaaggaataatgaatggttggtaactgggtcagcactatcaaggaaatgaacccatcaattttacatgacgtaaaagggggaattagtcagcacccagagagccactgaaccaaatactatcagaagcacatatgtagtaaccaagtaatatttcacatcaacaaccttgattagttagaaaaacatggacgaaatagaactacttaaaacaagtaaaagacctagaagttctaagccagtaaccaggcccaaaataaagagtaacagaatgtgaagtaatccagataatggatggaacacttccatatggatgggaggaacaacgtaagagaggtaaatcctaactaagaaagttacactaatattagcacagataaaatatcacatgattcaggcgttatt

SEQ ID NO: 51188 - DNA, 1409 bp, Oryza sativa
cagtttctatacgtatggatactgttgttatactaatgtgagtcaagttgggacgaacttgggctcggaatatggtttcttggttgttgcatgtgcaggtgttgcttaaggccttgggagagtgttgccggtgatagatcgtagtcaacttgggagaagttgatgtccagggatcaagagatcatgcgggatactaaaggctagaggacaatgcacgtggtgatgaagaaatccatatggtatacaagaggaattgtgtacgtatggaaagaggagtcgaatttggaagggagtccgaattcgggaagtttgattgagataaggaaagagataagttgtttacttgcaaaagagggtttcctacgtgggttaggagtcctaagttatgttagattcgtgggctttgcacagcctacctcatgtataaatagagagggagggtgaggcctcccggtatcgattgtagagagactagaattgagagcaagttagggttttgagtttagttcgagattttggtgaggagtgttgttggtgcactttgtaaacactagttgatgcaataaagtcaaaaagtttcaatctacatcttcgagtttgtcatctaccggtgtttctgggtcccgatggtctaaccataggtgtacgcgcagtctgactggtgggatagctgcggtctgaccgcaggtgtccgggcggtttgaccagcgaggcgttggcggtctgaccggcggcaggagggcggttcgatcggcggcaataggacttcatcatcgtcttcgttcgagggtaatctttaattgcgcaaagattttcgggtttttggttttccctgccattcacctcccctctggtaggtttgtttggtcttgtgtgatcttacaagtggtatcagagccacgttcttctatttgatctttactggtctttagatttgttgccatggctgaaaagttttcaagcaaacctcatatttacaatggagttgattttgattattggaagaaaaagatggagtcttacattacatctcaaggctatgatatctggatgaaagttgctacagtctatgagattcctggccgtattgaaactgttgcccagaaaactgattttgaaaacaattgtaaagcacgaaatattcttcttagtgggatttctcgttctgattttgatcgtgtttcacatcttgcaactactaaatgcaattaggaacttggtgcaatatcgatctacatatcgaattaaatactcccgtaattctattatatatacagagagctcagtttatttgaatgatcatcatttcatgtgtacacatattatggcacccacctacattattcaaatattttaatatttgataaaataggttaataataacttttcttttatttgattttaatatc

SEQ ID NO: 51189 - DNA, 658 bp, Oryza sativa
actagggattactgtgagtagactgggatttgtgccgaccaacctacgaaaaattctaggagtgctacacatacaattagagaaggtcctgccttagagcaagtttaataatatagccaactatttgcttcaattcatttataaccaatttaatagcttattcatacaatagttacatactacattattattacctggttccacctgtcatacacacatcgcgtcttaaagtccgtgctatagctggctacaaatctgtagcccactactcttctctctcctcatttatctttttaaaatatatttgcagctagcttataacccgctattgtacctgctcttatcattgaccaccgttttgccgttttggccagatcaaactggtgtggtccgatcaaccgacgtggcacgacggctggggcagcgcaatgattctaccggtgataaatccacatttaaaaaaatcagaaatggaaaaaagtgaaacttatcaaaagcagcaaatctcaagtacaagcaccttttcttcagatagtaaaatcatgagttcgaccacgaagatgggtgcccaatattttcccaaaaatgaaaccgtcgagcttaccgatcactgtttctcatcgatctgtagtagtactccttagtggtgctctgcttg

SEQ ID NO: 51190 - DNA, 543 bp, Oryza sativa
tgcatcaattctactataatttaatatcacaatgcacaggagtaaagagttcaaaatttcaaaactgaaaattgaaaaaaagtaaaaaaaatagaaaacctatttttttttttggcttggtgcaggactgcatcactgcgggcgggcgttggcggcacacgctgcaggtctgcagcagtgcgctagtgcggcactgcggctgcagctgcggcggcagccggccaaggtgtcgacgcgcgcgcgtggcccggtggcgctcgctctcacgatctgatcagatcgctgatcgcgtcggcgtcgcgactcgcgagggcgaggaggagagatacagagagtcctgtgacggcgcgacgcttcggtttcttaattccgatcgattagatacaccatacacgcgcgtgtagggtggggcctgtggtaatctaatggtttaaaatattaggtacaccaatttaagtgaaaatcgacggttagatttgatagagctacgtggcagcctaagaacgtttgtaggagtcccacgtggcagcttgagtgcgtttg

SEQ ID NO: 51191 - DNA, 1076 bp, Oryza sativa
ctattcgaatagccgcgccctcggttatgggcaagccgagcaatgtacccaagttagtgttttaattcttaaaacctgcttaacaactaaaatgtggaatggttggcctgggttggcttgggacgagctgggacccagggtcgggttgccagttcggtctgaatcatcgtaggccttgggttaaggcaggttcgtgtgggttcacggccttgataaataatattgtatagtactagattcgtgtttgcaaaatagccctgagcaactaaatatctttaaatgctgtttactgcaaccctaacccctttatagtataactcctttgtactcccttgcatttattctgcacttgtgggtgtgtcttgttgagtacggtggttgtactcagtcttgctcaatttttcccaaacccagaagaggagttcctggaggatgaaggctttggtgtctagctcgtgcctgccgtcaagcgcctgtggtcgtcgccctagtcttccgctatttctcgtttgtctttgtgtgtgctgggccttcgctgcccctgtaataaattatctatttacgcttccgcttgttaaactctgaattgtatcaacttttggtgtaccttgcctcctgggacaagggttaatgcacgcacgcaaggaacgcccgttgggtcagttccggtcgtgacaagttggtatcagagcccccttgaccctaggacgagccttagatcccaagccttagcaatattttcaaaataaaaatcccttcttatttgtgaaaatcctctattctctctctgtcctgctgcttcatttatcgccaaaatctgacctttaaaatgttgcttttctttttgtttttgtttgtagatggccggcagcgtcagccgtcgtggtttggacatgactggcttcgtcttggagctgcggggcatgtgcgtggtcctggggcatccacatggagtggactaccaggccaggccgctttcggagcaagagggtgacgatgcggaaccccacgctgcttgggaggtcactgcagtgatcctcgctggctctcccgagcggacttcgctgacagtcacc

SEQ ID NO: 51192 - DNA, 572 bp, Oryza sativa
cagacatctatatttccaaacctctaataggggtgacattcctggctaccttaccataatttagaactaagaatgaggttatgcccaggtgttacagttctcaacatgaggcttgtgaactgctgcatgtgttgttgacattctgctaccaaaaacgattagttctcttaacaaaataaaagaaaaaaaagggtaccatggttgcttaggttggatttttttaatatactgagacaaatgagtgttatttctttcattacacaacttacctggacatgcgcaggagacattagatcttcattagcaggtggcactacatcttcctcagatggtggttccactcctgtcttttcataaagaaactaaaatgggacagggattagacaaggctagaatgcagaatcacatattattgtacagttatattagaagggtttaccctgatcagccggttcattggaatccattcggcggcgaagttctgcattttcgcgtgtgagttttaaattttcgtttcgcaaagtttgattggctgatggggtagatggcctaggtgctgtctctttaccggg

SEQ ID NO: 51193 - DNA, 740 bp, Oryza sativa
catgctatatttacaaatctgtgatggaatagaaaaagctaaaagaaaaagtgagatcaaggggaagggaaaaaaattttggggttttttttaaaaagggaaaattagatctctctccccttgagccgttggctcaagggggccttgaccgcgccctgatcgggggcgcccagcccaatggctggtgggcgcccgtcacactgcgccatataaaagaggggtggaggccggcacggcagagagtacgagattcaccgccgccgccaactccaccctacaaaccctaatccgatcgagagggggcgcagccagtgacgggaagcgccaccgccgcgccacacctcatcgccgggacatctacgaccgtcactcccgcagccgtcatcgccgtcgacctcaccggcgccgcatccacgacaaccgagcgccaacgacgatgatggccggcacttcttcatcctccaacacctcaaccggtcggtctatctaaaccctctcccgttttcaatctctatagttcaaacatcaatcccaaatagaaccacccgactagatctaacctaggtgatcctatcgcaaagtctaacaattgttatacaacccctgctactaactaatccaacatatatataatctatcgacaaatgtggagactgtattgtcttattccattcatttccttcgcttgcctgcgccaatatccatgaaaggtggatgaagctgagtttgactaacaactc

SEQ ID NO: 51194 - DNA, 648 bp, Oryza sativa
tcagcaaagtacaaggaaatatccatatgcacggctgacaaagaaaggctaaagctattttgcataacatagctgttgcagttataaataatgggtgttaccattcgactgcccacacgggacctgtccacataagaccacacagctatattcattaacctgcacaaaagtcattctcattcaatgttttcgcaaactacctctcatgagatatcaccgagcatgtccatgaccgcggatgcggttattcgaatagattagtttaacactctacagaggttgtacagcttacccacaagatacatcatctttttgacggccagttcgacaatgtcaaactttagattgtgtgcggccaaggagtctagaacaaggctttttagaaactccaccgcaacactgccttacccaatgaaacacattccctcacataaaggagaaagtacccatggctaaccttaacacctatcgtctagccacctgggtgccaagactcggaatcctactaggccaagtccttcccatcaggacatgtggttgcacgataggcttagatcaacggcttatgaagtgaagtccttaattgaccaagtcaacttgctaaactataatagcacacatctcaacagtaggctcacatagagacca

SEQ ID NO: 51195 - DNA, 722 bp, Oryza sativa
acgggcatggtctctatgtgagcctactgttgagatgtgtgctattatagtttagcaagttgacttggtcaattaaggacttcacttcataagccgttgatctaagcctatcgtgcaaccacatgtcctgatgggaaggacttggcctagtaggattccgagtcttggcacccaggtggctagacgataggtgttaaggttagccatgggtactttctcctttatgtgagggaatgtgtttcattgggtaaggcagtgttgcggtggagtttctaaaaagccttgttctagactccttggccgcacacaatctaaagtttgacattgtcgaactggccgtcaaaaagatgatgtatcttgtgggtaagctgtacaacctctgtagagtgttaaactaatctattcgaataaccgcatccgcggtcatggacatgctcggtgatatctcatgagaggtctatcttaaaaccttaaataacatgttgcattggatgaatgaattcttttattcaaattctacttactactcagtactctctccgtctatcccaaaatactataagagattttgatatgacgtgacacatccaacaaatctagacatacttatgtaaaaatttctataataggatatgtcgcatcctactaaaattccttatatttagggacggaaggagtacttctgtttcaaatgaattcattttatattaaccagcgtcata

SEQ ID NO: 51196 - DNA, 591 bp, Oryza sativa
aaaacacaatccataacctgaactaattcgcgagacgaatatattgagcataatttatccatgattagtccatgtgataccacagtaaacatgtgctaattatgaattaattaggcttaaaaaaattatctcacgaattagctcttatttatgcaattagttttattattagtttatatttaatcttttaaattagtattcaaacatctgatatgacaggatcagtccctgtatccaaacaccacctatgacatgtaaaaaaatcagctcaaaatacaacatatacacatagaaaaaatgacaaatctcagtggaatagaaaactgatttgtttaaatactattggagaacaaaattgtttctttttctcattgtgcacattgtattttgagttgatgttttgtgtgatggcaaatgtcataagtgtttcacatctcgaattttttttcatattgtttttgacttttttgatgtattttttttaggttgcgtatatgtagcacgctactgtgcggtagtacctgatattctccacgtgggtgtgacttcttgggtgcttgcagcaagctttgtggcttttcctcatatttt

SEQ ID NO: 51197 - DNA, 1307 bp, Oryza sativa
cttataacgtttaaattgtcaccttgttaatatttcataaagccaaaatagggttgagtttggcaacaaattgatcagctcctaattaccattccgtataaccttacatttgatgtgcagcgtcagatatgcaaatggtaagtattactacctccttttcataatataaatatacttttgtggtttttaaatatatttggacatttcattaaaaatgcatagaaatatttgtactatttttttcttttcagattggtagtatgggatagctatattttaaaattattaggggaatatttggggacgaagtttcagaactagtagcatgcaattaataaactttttgaaattgtgcaaatgcagaagtcacatgtacctgctgcattcgtctgtcaagtagagaaggatgagaggctgaaacaacagcgccgacgtgtcgtctctaattaccactcgtaaattttaccgatctgatgatgcggaagtgctaatcggggatcgatcgcttgggcacagggctagcgatcaatccccctccctcctaaacctgattttcttttttggcaccacattacttttctattttagtaaatttatgcacctaaaatttatacacctcaagtttatacatctaaaatttagagaccaaaagtttatatatccgattcaaatttgaatttgaattcaaatattttttttatatatagtatttctatacatctaaagtttatagatccaaagtttataagtcaaaagtttacatgcccgattcaaatttgaatttgaattatatcgggattcaaatttgaatttgaattcaaatattttctatatatagtatttctatgcacctaaagtttatacacctaaagtttatagatccaaagtttataagtcaaaagtttacatacccgattcaaatttgaatttgaattatattcgttcaaatttgaatttgaattcaaatattttctatatatagtatttctatacatctaaagtttataaactttagtttatagacccaaagtttataagtcaaaagtttacatgcccgattcaaatttgaatttaaattcaaatattagtttatagacccaaagtttataggtaaaaagtttacatacctgtttcaaatttaaatttgaatttgaattcaaatattagtttatagacccaaagtttataagtaaaaagtttacatacccatttcaaatttgaattttaattcaaatttgtatagtgtagtagtaagagaagaaggggatgtaaagtagtaagggggaggggtgggtgatcgcttggga

SEQ ID NO: 51198 - DNA, 698 bp, Oryza sativa
tagtaaccaaaaacaagtggcttggtgaaccatcactggttgaaccatgttgctttccaaaacgtcacttatttgtgctcataggaagtagtgataagaaaattttaatcaaaagagatgatatagtttctcaaatgcagtgctatatttttcaaagttattttaggaagaggtaaactaaagaacatacctagcgcatgtacacacacacacacaatatatatatatatatatatatatatatatatatatatatatacgcacacgtgaaaacaaccctcttttaacacgctgaaaaaaaatgaaaaccagtgaaaattcatgttcttactaaattcctactcctactaactactccctttatccacaaatataactttttttatgtgacatatcctagtacagcgaactggacaaactctctatatgtgtcgcatccggacaaaagaccttatatttgtgcacatatggagtagtcactaccaccagatatctgtttcagctttggttttcaaactgctaataaaactagtactatcccataatataaggatttactgcttagaaaagtgctgcggagtataccattttttcccgtagatgactgctgattaaaaatctcaaataagtgtgttctaagatcatatataaaaggccatgtttagatcccctggaaaaatttttcaccatgtcacatc

SEQ ID NO: 51199 - DNA, 732 bp, Oryza sativa
gtttttttctttcatagttcaatgctactctctcgatttcacttacatgtctaaccatgtaaccgatgtaaaaaaagaaaagagagacgtataatatcagtaatcttttaggtacatgcagtaacagaggtagtaaagagggcaccaaccacatattaccatgaataagaaatacagtatagacacaaatacctacacacgaatcctacccgtatgagtaccttcgaaagaaggggctgccatatcttgagattgacaaataattagtcgtaaatgcaagcacccgtgtcaaatctatgaatgtacacacgcgcaccctacctgtatgagtacctccgaaagactaggctgtcatatcttgagattgacaaataattagcggtaaatgcgagcagccatgtcaaaattaggatttgaacccgggtgggccggttcctccacaaggaacttaaccaggtaatctacgctcacttcgcctgcatgctaatcttttaggtacatgtggtttgtcttctatgatatctgatttgattcttgttgtaagaacgcagataaggcaaattgaattgatcgaaatgctctcgttccactgatcaagtctgaagggtttggaagagcatggcactcctcaaatgttgttgtagttgtaccataaaaatggtcttacaaaattaaccatcaaacggccgtaacaaaaaaaaaaaccgaccacaagcaagatgaagtgaactt

SEQ ID NO: 51200 - DNA, 829 bp, Oryza sativa
ttagactcagtaattacatcaagatgatacaatcaaactgagtcactcccggcctctgcataaaatgcaccagccaaaaaaagaagaaagaaacaactagaacatctcccaagacaaaagtttaacagaaacaactagaacaaaagtttaaaaaagaaagaaacaactagaacatctcccccggtctctgcaagcatgcaaccaattagtatttagatgatttcctgggttctaataaaacatttaatttatctctttatttaagtcttgaatgtataaagactataaataggaacaacttatttggaaaaactcaaatgtgaaataggtgtaactttgatggatggagggagtattaaattacagtttcagtttgtagtgcaaattccgatggatagacctcaatcggtagtttgctacagccaaattaatgtgcagagagagttaatttatgtagtacttgtggtccagctaaaaatatatgtaagcgtcagatctcatcttaattatcatgccagctaatcttggaaatcgtacatgtatttttcttccgagagacatgatttggttcttgttataaaatgatcaagaaggatctttttattgattatagtgctcatgggaagctttttttcagtgattaagtctgaaggttctgaaacaggaagccactcaaatagtatcactgtatcataaaaaagggtcttcggttttaaaaatcatcaaaagggtcttggattaatggatcaaacgaaaccataaaacgatctcgagataaaaaaaaaaatctgaccaagccattctgattgcagtgcttgtcagcaggtac

SEQ ID NO: 51201 - DNA, 538 bp, Oryza sativa
atacatattgggggtgaatatacaatattccactatataataacttgctcactatatgccgacgatacacatgatttatgtaagaagagatcagtatcctccctccgtctcaaaatataagggattttaaatatgtgacacaactataaatctggacatgctccttgccaagttcgtcgtactaggatatgttccatccatccaaaatctcttatattttaaaacagatggtgtatattaatcgtacatgatagataatgatgtacaaattaagtccaagctgcttttgtgatcgcaacttcgcaagccgctccatctaaccatcatattagtatgtaccacctacattcagagctccatatatatagcacgcagtcataatggatcggaagcactataccaggatatatattctaagttgagtccagttgaaaatctcaaatcttcctgcttaattttgaggggaaaaaaaacataactgcattacaaaccacgagctgcatgcaagcaaagttgttcttcatgctcacaacaattt

SEQ ID NO: 51202 - DNA, 801 bp, Oryza sativa
gaggagacaataggggagactccggtctaacccctcctactcctctcctcctcctcgttccgtttttctacttcgcttcttgatccaagctatgcagatggagatctagggagagcaattggcgagagatgcgaacacaggaggagggaaaggaggcgccggccagggacaggggtggcggcaccatgaggggaggtgggattcggttcccctctctttaggttttaggggagaactaatggcctgggtttatggtccttctcatgttagcccacttctaaagatatttttcttttatttatttctgttaacatctttattttaacaagtcaacccaaactaaaaaaacctaaatatcttttaatatacggggtattacaacctctcacctactcacctatcactatttattagggatattttggttatttatctcttcccttatattcaccttgaaaagatagggttggactttttataggagagagagagtactggtagagtagcattagcataagaacttaatacacaagagaggcaggcaagccacgacccacaaaggtacacactaccaaatgatagccggtcaccgtatcatcataatctggtgggtgagctaagttagggcctgtttggatgcgtttggatgcagggactaaactgccacatcggatattgggacactattacaactattagccgtagataggggtgaaaacggttatggaaattcccgatcgaccgggcaccattttcgttttaggggtaccgtttccgaccgtaccgtttctggctattttt

SEQ ID NO: 51203 - DNA, 1109 bp, Oryza sativa
acacaaatgtgtaaattttgtgaacaatgttactaacactttgtcggataaagaaatgacaaaaataaaagatgtagatcttaatgagttatacgacttttttgttgatgacttttttagttaaatcatttagtatttgaaaatggtgtttcaagttgtcatatttacaggttcaaattcaaactgttcaaaaaatgttatatagaaaaatgaccaaaataaaagttatagatcttgatgagttatacaactttgttgttgatgactttttcagttgaaattatttagtatttgaaaagttgtttgaagttgttatatttacaaattcaaattcaatctattcaaacaaatgatatatagaaaaatgaccaaaataaaagttatagatcttgatgagttatacaactttgttattgatgactttttcagattgaaatcatttagtatttggaaatgttgtttgaagttgtcatattttcaaattcaaactattgaaaaaaagttatatagagaaatgaccaaactaaaagttgtaaatcttgataagttatacaactttgttgttgacaattgttccatttgaaatcatttagtatttgaaaatgttgtttgaaattgtcatattttaaaatttaaattcaaactgttaaaaaaaagttatatagaaaaagaccaaactaaaaagttgtaaatcttgataagttatacaactttgttgttgacaatttttccatttgaagtcatttactaccaaaaaaattattttgactcataaaataaattattatactgcagttaactatttcattacatgtcaacttacaaatataaacatttcatatggaaaatgaaaaaatattcatcggtggcgggcattagttaaagcccgatagagattatgtcatctcaatcgagcattagtacaatgcccgtcatgaataagtcttctgtgacgggcctagttattatctcaatcaggcctcaagttggtgtccgtcatggatgatggtcatccgtgacgggctccaacttgaggcccgattgagatatgaaatgttatctcaatcgggcctaaattactgccggtcactgataggtggcatgcgtga

SEQ ID NO: 51204 - DNA, 781 bp, Oryza sativa
ataaagaaccaaattgcactcccatgactacgcatggtacttgaataattgaaaccggaatcaaagaaccaaattgaaaccatattgcacatccatggcaagcatggaacttgaattatttaagtagaaccagaatctagaatattaaaacaagaataacatcgtacacataagattaacttgaaatctaaatggcgtgaacaataatatgaacataagcagttacttatcacgtagaaatatataagacataaatagatagagtaaacaatccatgaatcacacaattaattcgtcatgcacttgcctccaacgaaggattggtatcatgcacgatctgatggaccaccacctaatcacaaacaaaacctcagcaaacacatccaaacatgcgtataaaacaatgaaaaaggtgaacctactgccccatcccatcaaaactcaataacagagaacaccacttagactatacacaagactactgtttcaaacctttatatcttgaaatatgaaaaggctatgactgaaaatatatacattttgaaaatctacagaacaatacctacaactttgatgtagaaagcatatttttattctgccataaaaatggtctaatttgcgcttgaaagcaggcttcagaatctgtccagaatttcagactgtccacactaaacaaccataactggagttctagttgcccaatcagggtgtactttaccgatatggaaagctaagaaaaaactctacaactttgtctataggcggcctggctgattacatt

SEQ ID NO: 51205 - DNA, 591 bp, Oryza sativa
atccaattcacaccattcctttactggagttcgtgaagagattacccctttcacaaggggtggttacttctcacatactatattggagctcgtgctgcaactaactagtccatttttcttcactctccttcgttgttctatagctagcttattgctttttattgtacttgttctaaggctgcattcgacaaaggacaaacaaaggaaacatccatcatttttcacccgtatgtcagagtgtttttacataaaactatatgtagaaaagttactttttaaaataatcatatttctatttttcatgtttgaaacagtccttggctttttaaacagtcctaaatcacctgatgaagcgataatggcatacttctttttacgtgtcttatttttttcctctcctctcagacatagcctaagacatgtttggaactcaggaaaacaatatatatgaaagaaaacatttggaatataaaacgcataaatacatgtgtaaaacatataaatgaaaaacatacaaagtttaaaaagactgatgtttgaggattttttaagggatgatttaattacatccggctaatcctattttaaccc

SEQ ID NO: 51206 - DNA, 555 bp, Oryza sativa
cggtctttcgcgtgtgtatgggccgtatggcagcttagaagagaccttcgtctctctctcaaaaatgagagagtgtgcgtactggagttttacaaattactccgtactgtactacaatagactgaaatacaaagaagaaaaataattgagtattggttgacggacatactatcctactaatctactattcccttgcacgttcatgtgaggtctatttgcacacgggtttgttttgataatgctcatattttgaaactggcacagatccgtagattctaaactttgtgtatatattcaaactttaccatggatttcatagatattcaaattttgtacgcggttttttgagcgacaacagttgcagggtgttgactgactactgagtagggcatgctatgtacgtcgagtgtgaggagggggattgtccgtcgccaaaatatcacctcaactatgccgcgagaatgaagtcgcgctagttattttatactactcaactaaatcaaatgcctctctaatggtcatttagatgacgttttgtccaatactttaatttgg

SEQ ID NO: 51207 - DNA, 6904 bp, Oryza sativa
aaaaataaatataagggtgaattagatataaccataggaaaaaatactttttttcaccattttgaggtatatttttgctcttgcatataccatatatttttttaacattttccttttgttttttattttcctatgcgtaagggtaaattagacaaatcatatagattttgcatagaaaggtgacatggcatgtccatgtggcaattttggtgggaccaaggactatattagcccacatgacaaatttaaaggacttgtttggacaatatgaaagaataagaactaaaatgacccaggatcgaaactttaggtaccatattagctattctcccaatgtatttttgtgttgtttcatgtatcacaaatttataattaagttgacatgcatgtgtctatataatgtagcgtatgtgttcatgcatgcacgatgattaagttggaaacgatgatgttcaaattagccccaaatttctagcatgcttaacaagagtaacgcaagttattagttagcaagttcaaatatttgggacgaagatgtgagaataagatcaggatcccactaattaacacagttaattactatagaattaaagagaaaacattttttcttaaaagaatttcctccattgtagcgattgcaccctaatcaacacaataataaaaaatgacacattttttttgtccaaaataacatggctgcatgatcaacaaaacatatcaatttccttcttcacttactgtcatatatgttgtactttgatattttttttaagactttgtactttgaaattatagtatctacctatgttcatgttattgagggagaatatgcaaagatgaacaaacatgtaaatatagcgtattgacaatgaattacatatgaacctacaaaccgatgatcttttactgagtttatatgttctttgtgataaaatatcaattttaaaataaccacacgaacattcggtcatattttatccgattgtgttattagacacaaaatatcgggggcgtctaatgggcgggtgatcgctcccccgtccctccacctatcacccttcccccccctcccttatacaatacactcctccctcctctctccccttcctcctccctttcttctttttctactacactaacccacaaaaaaaaatttaaaaaaaaagttaaaaaaatttttccttacaactattatttttaataaatttgaattcaaattcaaatttgaatccgctttttaaacttttgacttataacctttggttctttaacctttaggtttataaactttacatttttaaaaatcctatttataaaaactttttaaatccaaattcaaattaaatcgcatttaatctaaattcaaatttaaaaccggtatgtaaacttttgacttataaactttaggtctataaactttaggtgtataaactttagatgcttaaaaatactatatatagaaaatatttgaattcaaattcaaatttgaatcaaatataattcaaatccaaatttaaaacaaggtatgtaaacttttgacttataaactttgggtcattaaactttaggtgtataaactttagatgtatagaaatactatatataaaaaaaattgaattgaaattcaaatttgaatttgaatcgaatatataaacttttgacttataaactttggttctctaaactttagatgtgtaaacttgaggtgtataaactttagatgcataaatttactaaaataatagagtaatacggtgccaaaaaaggaaaccaggtggagggagggagggaagaggggatcgatcgctaccccatagccaaggcgatcgattgcccattagaggtttcgcaaaatatcaacttaaaaaaacatcacgatcatactcttaaaaagaaaatgtaaatctaagaaaaaaaacacgtaaattttttttaagggaaaccgaaaactttattactgaggcaggccagccaaatcgctggtcaccaaatactcaaggcccggcggagtgccggcccagctacaagggtcaagcaaattacaacccagtttcgccagttcatgcactacttgttacattccctggggcaataattaaccaagaatgaaataaatcttctagaaatgacattcttgatctccagaatcacaccccccatgacagagagattgaaagagttctcctggagtgtagacttcagcagcagcgagcctatttcaaactctaccttcattatccccctttcacttgccgcccctacagccgctgcacaagcaataatctcagaatggaatgcatccatcatgttatcagctccgccagctccagcctgaaccacccgtccatgatgatcccgaataacatatccccatccgccttgtttggtgctgctgtggaaggccccatccgagttgatgttcaggacatcagaggtgggttttctccattttgccattctcctctccttcaacttcccctctttccaattcaacttcaagaattcctctccctggttatcaatgatatacgccaagtcaattgggtctctggctttacctccttccctcacttcattcatctgcttccaccattgccacaaacaaacgacagctctcatctgtatattctctgggcacccccaaatggtctccagcacacttcttgcattaggttgttgcgctagagataatctcaggtcttccaagttcatcgcctaccaaactttcttaacaagcttgcacttgaaaagcacttgaaaaacacgtgaattttgtaatgcaggattaccgacgatcatgttcctaggaaggaaatgtaaatctttttagaacacgtaaataacggaaatgagaatcacgggtatagtagagatgaggtaccgatgcggaacctgtgtacctagaactaagaagacaattatgcccttctccatcttaaaaaaaatatccttttacacttactacctaagtacctatatcagtacttaaatatcttttaagtggtatcttttattatggaccattagatttttaccaaacaccgtaaaatctctccttcaacatatagggaatgccttggctgtactctcgagcttccgttccatgaagcggccgttgtagaacaccggcctcgtcgtcactggtgatgaggacgcctattcacccattattagttgcaggcattcattgccgctaggtaagctggccaccctaccaatgccagcactccagccggcgccaccaacgctgctacgccgccctcagcaccctccattacgtgccccttcgtccacggaatcgccgccgcccatctcaaaccccttcttgcccagatctgtcaccctccactgcttctgcagggactccaccaccaccacgccggtcaatgtggccgccctcccctggggaggtctcctaggtctcggaaacgccagatcggggctctagcagcccttaattaaggcgttgtttaggcctcgtttacttggcaaaaacttttgcctatacgtaccacatcggatatacggacacacatttaaagtattaaacgtagtctaataataataaaaaaaactatagattccgctaggaaattgcgagaggaatttattaagcacaattaattcttcattagcaaatatttactgtagcaccacattatcaaatcatggcgcaattagacttaaaagatttgtctcgtaatttacacgcaaaatgtgtaattgattttttattttgtccacatttatactccatacatatgtccaaacattcgatgtgatgggtgaaaagtttttgttttggaaactgtggccttgtttagttcgcgaaaaaaaattttaggtgttacatcagacgtttgaccggatgttggaagggtttttgacacgaataaaaaaactaagttcataacttgcctggaaaacgcgagatgaatctttttagtctaattaatctgtcattagcacatgtgggttactatagcacctatggttaatcaggtgcaattaattgcacagtttgcatggaaatcgcgagacgaatcttttgagcctaattagtctatgattaaccataagtgctacagtaacccacatgtactaatgacggattaatcacgctaaaaagattcatttcgcggtttctaggcaagttatgaaattacttttttcattcgtatccaaatacccttctaatatccggtcaaacgcccgatgtgacccccaaaaattttcttttcgcaaactaaacaaggccgtaatctagacacgacgctccttcaatccgctctgccaaccagctcgtctccgcatcccatcgagccttcaaggagaagacgcaaggaaggtgctttatctaccttgcgcatgaccatcaagtggtgactatcagggcaatagcaatgcgtcccatgtatataccgaatctcagatgccacatgggctaaggaactgtggtagtcacaagattcacaatgtagcaactccaaagtggggtccacaaaaataaagttctccttttttttctccacttttccccatctccttctccctttcctcgggaccaccgctatccttcttctcccccatctctcacgccttcccctctctctcctctcatgctcgggtggcaacctgactcagtcttctctccttacaccgtgttgggtcggccaggcggagcagcagcctgcggaaacggcgccgaggtggccgggcagagtggcagcctctgaggcaacggagctaggcggagacagcgccgatgcggccgggcggagcgccggcctctgcggcgacggagccggacggagcgccggcctctatggcgacgaagccgggcaaagaggcgacggcaaccgagtagagaggcgaccgaagcggtgacggtgcaggccggagcagcggaggggtgggctcgccggatctagcctcaggttctctctggcgcggatgcggctccctatccctacccccacctcctctctgtctctctcccgctttctccccacgggcggatgcgatttttttagcaaaagttgattttttttttgacgaggttcttggagccaatgttgatcacgtgaacccggcgaaggaatggtcaccacttccctctctcctccacgcaagcactttttctacctggacaaacattgacacatgtcacgtgcgtgcaccgtgaatggcctcagagacccaatctgatgtttctcctgccatcgctcaggttattgtgcctatgaatgcactaaggccattcacagtgcatgtatgtggcgtttggtctcgatgcaccagctcggcgattcccctctacacaagcgttggtcgtaaccctgtgaagtccgcggaaccaattttgtgcactcgttcttctcacaaaatcaaggtcgcgtggcatgggggagaacggtgcagacgcattgtgaggttgtggccttacgggttcgtggctccgcgcttcccctccccatcccccgagctggcgatgaaggaagaagaagagatggcggcggaggaggaagaggaggcgacaaatctggtgcctacctacttgacgccccccgagccatgttgtcactcattgtcgtgtgtcgctccaacccaccggacccatcctcgttttctgatctatgctgctgctcgtcatcatcgcccactccaagccgcaacgacctctccttgacccctccacagcctcaatgggagcctccacgacccatccagatcgatgcgccaccgaggagagggtagaggccgcgctgccgctcgtccttgttgcccatagccatgggcgccgacgaggagagagaaaggatttggcaccgacgaggagaggggtgaagggatttagcgccagagaggggaggagagaggggagatctggcgagcttcgggcttgttttggccgcccggcgctgtcgcttcatggggaccaccgctgcaaacaaccctccgcctggctcgccgtcaccgcttctgcctttcacgagagcatgtgggttggggaaaggggaagcatcggttttggggagagagacggaaaaaggcgagaaaaatattgttttttcatggaccccagttaaggctacatagcacggtgaaacttgtggctaacattattctttggtgttcttggacctacgtgacatatgaggtctggcaaaattcgatgttgcactgctaatgccctaagcagtggtccctaggcaccacctgccgtcaccccccatctctagtgcaaccttcaccgcagagcacctggacggactggcagcgctcacttcgatgacaagctatgcccttgccaccaccacctccaagaactatgcatggaaggcaatggcacttctcggcgacacgcccaattgatgacgagtatctcagcccaacctcctacgcccttgatgaggagcactatgtgacatcctggccctattaggatatggactgtgtggctcatgagagccgtgtgctcctgtttgataccaccttgctaatgtagtgaaaagctggaaccaacttataatggtttgtccctctagtcgtatcactcctaggttaaccattttacacaaagcaaggatgaaagtatatgtgtgctatgtgtaagtgggcccacccataggatggactaggttgcgcggttccaaagggcgtgttgttacatgcttaatttttttccattttggttcgcgttaccataacatatcccattctctaattttatttattcttcaggagaatccaatgatgtgtggttttactttatggatcaacaccgtcagcccgacgtatgatggcagaagagtaactaaagctgaatgcaaacaaagtacaagagaatgaaggagcacaaagttgcagtacgtgctaaacgacgtagaagggggtagtagag

SEQ ID NO: 51208 - DNA, 756 bp, Oryza sativa
tcctgcagcccattcattacgcggtttctaggcaagacatgaaattacttggccattcgtatccaaatacccttctaatatccggtcaaacgcccgatgtgacccccaaaaatgatctgttcgcaaactaaacaaggccgaaatctacacacgacgctccttcaatccgctctgccaaccagctagtctccgcatcccatcgagccttcaaggagaacacgcaaggaaggtgctgtatctaccttgcgcatgaccatcaagtggtgactatcagggcaatagcaatgcgtgccatgtatataccgaatctcagatgccacatgggctaaggaactgtggtagtcacaagattcacaatgtagcaactccaaatggggtccacaaaaataaagatgtccttttttgcctccactgaaccccatctcattctccctttactcgggaccaccgatatccttctactgccccatctatcacgccttaccctctctctcctctcatgctagggtggcagcctgactcagtcttctctccttacaccgtgtcgggtcggccaagcggagcatcaacctgcggaaacggcgccgaggtggccgggcagagtggcagcctctgaggcaactgagctaggcggagacagcgccgatgcggccgggcggagcgcctgcctctgcggcgactgagccggacggagcgccggcctctatggcgacgaagccgggcaaagaggccaccgcaaccgagtagagaggcgac

SEQ ID NO: 51209 - DNA, 506 bp, Oryza sativa
tggtcatcatcgcccactccaagccgcaacgacctctccttgacccctccacagcctcaatgggagcctccacgacccatccagatcgatgcgccaccgaggagagggtagaggccgcgctgccgctcgtccttgttgcccatagccatgggcgccgacgaggagagagaaaggatttggcaccgacgaggagaggggtgaagggatttagcgccagagaggggaggagagaggggagatctggcgagcttcgggcttgttttggccgcccggcgctgtcgcttcatggggaccaccgctgcaaacaaccctccgcctggctcgccgtcaccgcttctgcctttcacgagagcatgtgggttggggaaaggggaagcatcggttttggggagagagacggaaaaaggcgagaaaaatattgttttttcatggaccccagttaaggctacatagcacggtgaaacttgtggctaacattattctttggtgttcttggacctacgtga

SEQ ID NO: 51210 - DNA, 2864 bp, Oryza sativa
  unsure (1)..(2864): unsure at all n locations
cgtttcaaccacaatcacaatataattctcatgatttaatttttacacaatgaaaatttgatttgcgaattaacttcagcaaagaactgcaaaaatactcannnccaaaacggaatcgtcatggcggatataatagatttccgtgaaaatactcgagttggtttatttattcgttggagttttttttattcacaggtcagagaacacgtgcactatagagcattgaaaggctttgacagcaattcttgccagggtttaaatacaatacataaatcataaataaagcaccgactatttacgtccattgtgtttgtgtgcaccctgaatttcttataataacccaaaaagaaaaggtcaaattggctgcttttaaagctccagggtggagatccatttgctgcaattctgttgcttggctcaacaggcgccattgaattctgtactgccttcttagggaaagctgtaaaaagtacagatgataaaaacatattagtgtagttttaaacacactgtgcataccaacactttccagatcaccaaacttcccattgttttatcagaggcaagaaaccaaaagatagtcttgactaattattatccgaaatttttcagaaatatccaccaaaagtgcttcagcaaacacaatcagggtgaataaacaaagaaagattgaccagtccaatgataaaaacaatgaaattgcaggagccagttccctgcttaaattcatgcacaaaaagaggaggaaaaaacatcaagagagatgatgtgagtgaatgcaagagggaactatcaggtcaacactgcttttgcaacaatcttaacggaaataaaactgcttctgcaacttcactttgctagctccaaggtctcgtttgccccatcgctctcgtaatagcgttgttcataatcttgcccagctaggtgtgagttgggacccaggtcactctttgggtagaccccctcacagattttgtaaatgttttggtgattcgtgatctcactgaatctacccagtaataagaatgtgtggttgaagctaaaaaaaaactgatttgtttgagaataagaattggtcctgaagcttgcttggatgatgcatatgggcacatgggatacctccagagccctcttataactttgttgatcatcgtcataacctcctcctgaacaaagttctctacaccaataaatcagatactaatcctccagaccctataccatgtgagtgaacctaaagagagcatctccaagggccgcgacaagcctcgtgaacctttggtaagaaagagtactagaacatctgtaaacaagggaattacctatgcaaatgataatattttattggactattgagccatccaaatcaggaaaagagcttctagctagcaaccatttggtcagcaagaactagaaaacatctataaacaggggaagttgcctacgtcaatggtaatcttttattggacttttgtgcaacccagattaggataagagtttcccagtgatcgacttcaaatatgtggctcgagaccacgacttgcaaacaaatgctgggcttccttacacagcaatgcataatagaccacaaatggagccaatttgtatacttgtataataactgtgacaaaatagcaatccttttctataagaacagcattattacaataaagcctaactgaccaacataaattagaacattctgtacctgtttaaaacatgcatgattgagccttctgttgagcttctgcatcgaattccaaatatgttactgacagtattgactattgaaggtagaaaaattagaaaaaatgtaaagggaccgccatagaaaaagaagggcagtgaaacaaataatgtattgcctcatccatattgcaaaaaatcacattacctaccaactttccattttgctgtaacatgattatccttagcaagagctacgcctttgaactgatccacattaaaaattttgccttcaacaggactcatctacaaaatcaccatattcctcctttgtaaatgtgggttggttgggatggctgatgattgatctctccaatgcagccagcatagccaccttggccagtctggtttcatacttgtaatgaatacagcaatatatggttgtgaggcgggacagatgctctatgccaaacacaacattactgctgctggtgtggttttcttctgctaccatgcattcgaggttcagttgttgtagcttcggcaagcacccaatttcaaaagtcaactcaagcctgcaactttccccaccgattcggatacgttccaaggatgggaatccataactgctgctgatcctaagccttcctccctcctctgtaattacttcttccacatagagaatgagagagagcagggctggcagtcctcccagtgtactgacatcttcttgcgagagttccttcagatataaacctaatcgttggaggttgacaagtgagccaatccatcttggaaccctagacattggcgcctgattgatgacaagttcttgaagactcaatggaggagggcaccatggttcctggatgaagtcatctgctgatacggatgaaatatgaattgttagacaatgaaggttgtctctgcctagcttacatatggaagagatcattgctttcatatgacccttgtatctttctgccgcatcagcgtgatggccaggcataaatatactaagcttcctcaggtttgttaatttaccaagtccttgcagcgtgttcagtgactgcgcaagcacattcacaactttgagctcttgcaatgcttgcatgttcccaattttatccggcagttgacatctcatatcaacaagtagataagtcagttgtcgaagt

SEQ ID NO: 51211 - DNA, 638 bp, Oryza sativa
aatattaaggttttatgaacttaaactgtatatttaggttgtagataaatacattttaaaatttactagaaggagcataaactgtaattcaagaaatggatggcttactgaatcgtttttccttctttattattagccctctatggctctatagtatagacttccaagattgtttaggtagtacgatggatcagtttctcagcgaaatctgtctatctcaggtactctcgagatcttctgcacaagctaaaaatttcacgtctacttgaattcttcaaatttgtataaattttgtttgaactactttcaaatcagttaacatgtgtctgaccaacgagatgagtctgtttagtcctttttcttttctagattatgatataaacgtaggattgaaacgcaagaactaagccaaccgaaggaggggggggtttgaatggttggcatacccaaaaacccaaactttatgcggaattaaaagttaccctcaaattcgacggatcgcggtctgaccgaagtagttgcgtcggtctggccgcctggaagctgtcggtctaaccaagattggaactctggtcggaccgccgagatcacctgccgcgcctgaagttgccgccggtctgacagccgctgaccccccc

SEQ ID NO: 51212 - DNA, 595 bp, Oryza sativa
catatttgtccacatcacgagcttttcaacaccgtacaacaagtgtagtcgacgaatggctgatatcagtgtaaacaaaattactgttctcgatatttcggaacagaaagttgcgcttcagtttgaaaaatcgtttctcatggatgaaaattcagaaaatttagaaaacaatgttattttcaacctcatgctgagaggaggaaggaaggttttctttttctaatgaaaccatattttcccacttcatgtctggccatccccatataaaaaaactcataatgtgtcaagctttccaaatcagcacattataatcttgacaagttaatcgacccgttcagttgcgtgaacaatggttgtttcatgaggatgacataacgaggattcgaccctaacgatcacgttctatcacgtttaatttcatgacaataaaggatgaagcatatttgagtaatccatcaagttcatattttaatgttgagcttgtcagtcttaattgaatctagatattgttaccatgaagccggagccagcggatgtggtgtcgtgacttccccattttctccccaagtacaatgtaaaattatacaaaatcctt

SEQ ID NO: 51213 - DNA, 758 bp, Oryza sativa
atgaaattgaattgtttaactgtattataacgaatttcctttaatttaaatgaaatacatccatgcaaacaaagtcatcctttaaatctaaattccaaaaataaatgtcaattgattcgctagacttcttctgtattaacaaacgatactgacctttccctctcttaacaaacatttttactttatcccctgattctatttccataagattcaaaatattacattcatcttcgatattattgacaccaatactaaccaacactgcggaaatgctttctttaattctgtatatttaaaatcatttaagagctgttgtgcgaccactatattatttattaatgtagagtcattccaaataccatttgtgatcaaattatggttttttcttttttaaccggcatcttgctattttcaataaaacaatataatttttgttacttaacgttacaattttcccaaataattttcaattgtaatattttttactttaaagattaattatagtcaatgaatcttagtcctgaccaagtacaacgaatatctaaataacattcaggcaaattatgttcgagcataataattcatgtcttttatattaaaagaaagttcgacacattatgtattggacctgtcagctttcatctattttgatgagggaatttttaaacagaaaagggccagaagattgaagaaaggggtcaatgtttaaagcaactttgctcaatattgccgaaaacgttttcgaatgggctgcagga

SEQ ID NO: 51214 - DNA, 769 bp, Oryza sativa
ttctattaaatgttgcattcttttacaatgtcatgtgggatgggtcctattactcagccatttattgtttaccttatgccattgataacttgggtatcaaaatgattagatgttggtttaaggaatgcttagccatgcttaattcaactagtagacaaatgtggatcacactattacatggactttgactattagcatagctttggattggtgccaccgcaatggtgtcagttaattaaaatacactgaatggtgggctgtgggtgcatggttttgctggtcgcacccatggcaattaaggactggttcacgggaaaccctgggagacttaccatgcttaccacaagcgggggtgggtaactgcttgatctgatgtatagctcgaccctttcctaggcaccggcggcgagggtgggcgtgatggaattgggtcggccggggtgtccggttgtccagctgccggattcaccacggcgtacgaggggactgcccactgccttttgaggggtgggggtgaaaccttagcgtggtgtggatggttaggggcgggttatgcgaagggtcttgtcacgattttccccatttgtagtatcatggtgatacttcggggcatggcgatatgtatggaatcgtgtcttgtgggtacaattgtacacctctggccagagtaaaactattcgaatagccatgcccacggttatgggtgatcaaccagattcaccgtaattagtctcacctctagtttagcttaatgaactggtctagttca

SEQ ID NO: 51215 - DNA, 1294 bp, Oryza sativa
taagatatttcatatttcaaagggccggggcgtaagaatacatggctgaggaatgtacgtctagggatctataataaattatcggtaaaatcgagggtttttttgaaaaataaccagatcccacagctcggcgctcgctcgcgaaatctggctacctgggcttcggggcgcgacgtggatagcgcggcgatcgaacacgtgactccaaatcgctgtgggagcttcagttgggggcaggttttaatttatctgatgtagaaggagagcaggaaggagaagaaaggctacagagtgttttagagtttagtataccactcgatgtttagtataccatagcctatcaaattcgtgcctactcgatgttttattgggaattttactactgttctggtttgtcaaattccaatgtggcatcttgtaataatgaggctagtctcaggacctaagggtttagggtatccattaggtaaaacccacgttttatcatttgttccaagaaaactatgtgttgagggtaaagtgtcatatgctccctccgtcccattttaaatgcaaccataagtttccgcacctaactttgatcatccgtcttatttgaaaaaattttataattagtatttttgttgttatgagataataaaacataaatagtactttattcgtgacttatgtttttaatttttttaaataagacggacagtcaaagttggtcgcggaaaaccatagctgcactgaaaatgggagggagggagtataagtttgtattatcgattttgttagtatatctttgtataataatcatgaaaaatatgagatattatatatatacacacatatattagccacaatttaactagtgtcggttatcgtagtacgacgatgtgtatgtatctacaaccagttagcatgttattattattgactattgtgttgtattttcatacccatatagtgcgagagctaggaagataaagtacaggatatgtgcaactttgaccactatttttctattataatacaacaataatatctaataaactattatagtttaaaattacttaactaaaatctacccatatgatttttatgtttttaaattaaatatttttgagagatatttataattagagttttaaaagttaatttattataaattaaatcaatgtacccatatgatttttatgtttttaaactaaatattttgagagatgtttattattaaagttttaaaagtctaatcatagttaaatctatgtacgcatgtgatttttgtattttcaaactaaatattttg

SEQ ID NO: 51216 - DNA, 683 bp, Oryza sativa
aaatagaaaaactataccaatacgaatacctttacgcgatcttcttcattgccttgatcaatgctgaatggcctttggcttgatgttcatcaacaaatcacatcctcatgttcttcgacattacatcttacgctgtttcttcaccaagggttgatcctcagcaacttgtgccatccatcccatggcctcgatcggttcgtcggtgttcagccaagcacttgctcctccagcactgagttgggtcctttggcgtcaagcctccgcttgcccttctcccatgcatggtccatcgcgtagccaagtattgccaactcttcaccacatctagacatcttccgtcacttctaggcttggatcatagtgtaaacctcattgtattacatctttttcttcatcatcttcatcggctcttcatcgaactaatcccttcttatacattcaataagcgcattaatcccttaattgtttgtcatcaattaaccaaaactacaaatcttatcaaatcatgtttaaagtattcataatggtaaaacaaatcataacaaaataaatgatacttacaagattaatggtcaaacttctgatgtgaaaagttagcagcaccaaatataaaaatatggagggagtacgtcatttaaattgggtccatccatatcggcacggcacctgctttgtttcaagct

SEQ ID NO: 51217 - DNA, 554 bp, Oryza sativa
catacattaaaatatggaggtagtattagcttctcaatctaacgttgagaagcaacttcaccgcaatggtactatggaacttatattgtagaaagtcgtcgtgttgacgagggatcccagtaatcagtcttcagaaatgtatctaacagtgtcagtttttagtcggccatatcatggaggactttttccaatggaagcaagcagggatacctatattgagaaatggagctaccaacattacagttgcatgcagatcgacttgtagctgcagccaatctttcttcaaaacaaatcaaattaaggtcgtcaatcatgatctgatttggaagaaatgttcagatcttcagagaagtcatatctttggtttattaccacatcgaggagctaggaatgtgtttgcaatggaagcaaaagcaggatctacttaattaaattgcgttgagaaattgattgggttagggtagtttttatatcgttttgtcagtttttatttgttcagattttttggcagcctttccctttcttgatctgttatgtacttgggctgcaggaat

SEQ ID NO: 51218 - DNA, 668 bp, Oryza sativa
agggagtattatttttctctgattaatagatctcgatggagcaaattggtcgaagaaggaagaagaacatacaaaaacactttcccccttcctattgtcactctctgttggcagcataataaggtcgtgtttactgtacctgttgatgtgcagttagggatgtaagtgggtagtcccgctatccatataaaaacccacttattaatttattttccagttcccgcacaatattttatttcccgcttatccgcgcccttcatgcatctgtatctgcagtggccaacatctatcgtgtattgtcaaccaagcaaaatctctgtcttttgtgtttaagaggtgataaaatcacaacaaatttaactgtgacaaggacattacacacattgaaccaaagaggtgtgaccatgaacctagcattggatgtccatttcacaggatttttggataatgaaggagagaaagacacatttcagaggatatatatatatatatatatatatatatatatatatatatatatatatatatatatatatatatatatagacacacacactgtaccacttattattacttcctcattggcttgcaactgaataatcaagtcaaagatatatagcaataacaaaaacaacacggattatctacataaatgagcagacaggggg

SEQ ID NO: 51219 - DNA, 2355 bp, Oryza sativa
aaatatatttagttttggactcgtttgttcctctcaccatcgaaaacataatagaatacacatattacaaactctatacgttatacatgcaatcatttcaaatctcaatggttatatgaccaacaatttattatattatttaaaaggaagagaagggctctttacaaaatgcaaacgccggccaacatgcattgtggtatttatatctcactgacaaatggcccaaactacaaaccaactgaattttgctttcaacataacagcttgcctcttgtatcactgatgattggtccaacctatgatggaccccttgtacaggctatggagccatgcaaaagccaaagagtttgcatctatgaagagggccaagcaaacggtaaagtaaagcatgtactactactaaccatgaacagtgcaacagtagaagtagctgtgtggatagctatggcagcttaggccgtacctctctaggaatatagatatactccctccatcccataatataagggattctagggtctgtccagattcgttgtactaggatgtgtcacatccacccaaattctcttatattatgggatggagggagtaggtagatatgtgaatgagctcaaattagttatttgttatttttgaaagcttttaaatttgcatggaatcaaactgtgaagcaaataagataaaaacaatgctttagcaatgaagcaatcgtcaaatgtagtatagataaaatatgtacctggaattaaaaacataccccacacagtgtcgggtgtattgtaaaacttacaaaatttttagaacttattctcaatgagtaaaaattctccaagcctgtgcttgtctagattaaaatacaaaaccttctttatttatttcctctcaccacggccttggcccaaatatatttcctgaaaccaaactctactagtcagtgattgtcttcgatctcttgcctggataccatgcatagaatgaactctcatctttccctttttgtctgttaagtgattattattattattattattattattattattattattattattattattattattattattattattattattattattattatcaactttcctttatttgagatttaaaacaacaaaactaggacttctgaagaaagaaatagaagataaaaagttgaacttcctaattgtgatattcttagtaaagaaagtgaaacctgttgaaacgcattttttttatataatctcagtatcaaactgaataatgtattagaatttcacatgcaaaaatcaaaactgaaatcaacagaaaaattaattgtttcatggttttaagtatttatttaaggactggactgaaacccaacgaaatggaagctttgcagaattggagcatgaaaatataaaaggaaaagaaatgctggtataacttgatcatcaaggaatgagtgatgaaccttatcgaagcaaacaacttaattagttaattccagaacttcatgatgaaaaaagtgaaactgttattttccatccatgattaaaatttgtatgatgttgggttatatcttttctgatttcactcacacatcacgcattgacaatatcgttgtattcttcactgataatttaccatataaaatctttgtacatgtacagatagagtaaattatcttttttttgcatgataattatggtgattaattgtgtacaaaataatatatttcaactcattctggtgttaaattatacataaattaatatatttataattacttttaactataggcaaggttgtaaatttttggagcatggggcatgtgacctgtgagggcatgtgcctactcttttcgtgttttagttttattcactatgctccatgctctgctgttttttctttaaagttctttctaatccatttataatttgtcacatatactggataaattgcttgcgcatctaattcttttatcttctgtttttttagatagcatagaccagagtaccatggcacttctagcacggtgtgactaagtagttccagatcttgatggtacaacttggcttctttttgcttgggacaaagatcatgccaccgtagctgcattcacactgtgttgcccccttcatcacctactagcaagtggctcttcttcaagacttcatagtgatggcgatgttcgtccctagcatattcgcctgccttgttgcgctatcggctcaaagctagccaccagagagttgtcagcgatcgctccatgagtgaggaggagattactggccctaatgttcatcgccaccgtcattttgtttgtgtcggtggtactcgtaaggttcttctactactatcttattgagttgaggg

SEQ ID NO: 51220 - DNA, 1400 bp, Oryza sativa
ttctcgatgattggactaatcgctaaaaacaaggagaaggccaaaacgtaggccctagtggggcctagaatgttagccgattggctgcctagttcctagccaaccttctggtcctaattgtacattctttcttgctcctttttctttccgtataatttcctcccgttctatccaattttgctcatcgattcatttaaaaaaaacaaaagtaagaacagatcaaaattgtactaaaatctccaacaaaatcactctgcaacttcacgccataatatttttttctctatgacactgtgaaagaaagggggattgataaactcatattcaaaatatgtgaaaatgaaataaaaaaggattgtgattcacatcaaaagatgcaagaaccaccctatgcattttttttattttactcaaactgttgatgtttctgcacaatttggtgcctagccagatttaaaaaggttgaattggatttttataccaatcctaccatttgtcgcattacagctgcattttgtatacaactataacaatcaacatgcatcgctataatttgaattcactacaatttcagtgacatgtgattcaagtccacttaatctgaatctactcaaaggataaaaagtgaccagaaagtgcagagatgaatagtgtccgttttatagtttatggattttttaccaaagtggcataatacttagattttaacaagtcagattgaatttgatgtaaaataattgttctgttcattcacaagaataattatatattgtggttgtgggagagcaatataattattcctatactgatactttcatcaattcattaggtacttcattgtaattgatgatatttggactacaacggcatggaaggctatcaaatgtgctttcgctgacaacaaaaatggaagcagaataataacaacggcgcaaatcgacaaagtatccagattatcttacaggcatcacactgatttggtcgttatgcttgggggtctcagtgaggaggagtagagaatattatttgacaacataatatcagccagtcaaagatatttgttgcctcattatcagttacatattggatttaatgcacataatgatatgctaggatgcacgcctttggccataaggattgcagctggtctgtcactgtcagcatatcctcctccttattcatatacttcagctttcaagcaatatcccctcttacaagggataaaaagatgctgcacatcagttatgcttatctgtctttgccattgaagtcttgccttttgtacttgagtctctttccagaaaattgtaccatctcgaaaggtcggttgatacggaggtgggcagctgaaggttttattgatgaaagagatgaaggtagcatctgggaaacaggggaga

SEQ ID NO: 51221 - DNA, 2138 bp, Oryza sativa
aagtttttcaaaaggaccaaaatgtgaaaaatccagttttctggtgagctccagtacgggctcgttggggttatccttcactagtgatgtgatggcagcctcggcttcctccacatccacaacagtcgcgtcacgacagtcgacggtgacatggactcgcgtgagggaacggaagtcgcgcattccgaaatagttgccgtgaagccgaagtccattcgccctcaagtaaagcctgagccttcggaggcgcggcatggctgcaccccagaaccgtagcctgagccacccgtcatccaaacacctgaaccagaacacctctagactccgaaatccatcatcatatatgtctatgtggcagatcctttgtgcggaagacgccgaagtcaaattgagaacgataagactaggcattcttccgaggacttcgaaatcactttcgttcacctcaaaaacgctgatatgcaggtgggtgagttctctcatcccgacaaattctcctggtacccttatgaggttaccacgcaagacaattctcaactcaggtgttttatatcctccccaccgcaacagcagtatttcaagtagagcaattggacaatcaaaaaggaataggtacttaagtgtacctctgccgaggatgatgttgtcaatgaaagtttcaatactacttccataataactttaggatgttttactgtcaccatctcctggaccccactgtaatcccagcttcctcagcccatctttatctattatatctattatatactaaaagtccattaaactccctataaacgctctcaagctgccacgtggctccctcaaaacgctctcatattgccacgtggcactctaatataatagagaaatctgaccatcgattttcatttaaatcggtggacccattattttacatcgttagatctattttaaaaaccaaaaacctcccaccggccccaccacctctgtgcagtacgtgcatctgtttagtacttttttttttcgtttgttcctttcttttctttttccaatcctaattaaaattgaacctatctttatagaaaagaatacccccacaaatagacatcaaacgcgttaaaatccattaaatatcatataaatgtttctaaccgttgtgtgccactcttaaattagagaaacgtccaaccattggttttcactagaatcgatggacacattattttacgtcgttattagatctgtatattaactaaaagtccataaaactttctatgaacactcctaagtcgccacgtggcatcctagaaacgctcttaagccgccacatgccactccaatatataaccgttgatttcattatatttgatggacccattatttacaaccattaaatttatcttatagaaaaagttaaccacccaaacctaaccccacccagcgtacgtacttatatctcatatacaactacctactatatatgaaaataataataatatacctcatgtattattattattattacaccaccctcttcctagattaactcttccttctcatattttttacgctttattagttagaaagaaaaatcttctattatatactaaaagttcattaaacttcctacgaacgctcctcaattaccatgtggcatcctacaaaacgtttctaaaccgctacgtggcgttctaataaatcggtggatccgctatttgtttaataaattgctagactcactattttcaactattatatttatctttataaaaaaaaatcccacaacccaccccttctctcctcagtacgtatgtatgtacgtaatacaatgccatgctttctcccctcttccaatccttctcttcctatttctagatgaaaattttaacatgaaaaaatattataataaaacatctaacctttgcttttcacttaaatcgatcggtgaaccaactattttaaccattgtccctaaaaaaatattttaacgattatttaaaccggtgaacccattaatctatatataaaagaaacacttccctaaattttaccatagaacattgtgctttgcatgaaaagcaaatataaacaaacattaaaaccattagatttaggtatatagatggtttaaaccggtgaacctatcaaatctatatata

SEQ ID NO: 51222 - DNA, 771 bp, Oryza sativa
tcagtagagccattaattatatatggtttgtgtatgtaatgtcttttataacttaagttttttctctttcactatggaatcacaatttcctatgaggaattatccatagctatgaccaatcaatgtttgccgtcaaataataaattaattatcatttttttctaaaaaatgggtagagccattaattatatatggttgtatatgtaatgtcttttataacttaagttttctctctttccctgtggaacctcaagagtcatatgtcttaggtaccattttttataccgtaagataccaatcctaatctccaatagataattttataaataacaattaaattcgtcatgcaattctaacgaagaaaattcatgggaaaaaaacataattttaaaacattgcagatattaattcgctggtataccgcctttataagtttctcaaatttatcctacgtacggtgcatgcccgctcgtatgcgcgggctaccttcctagttcgacttaactagcagctctgagaccatgtcgagtgagcttctctcactgacatcgatcgtcgatacttcctccaggttttgcatagccgtcataccagcctgtgcttgcaaaccatctcccaggaggaacaccaatttctttagctcattcacggatacaggcaactgtttcacgcgggttctcctcacatctatggtctgcaactcatggagttctccaatgtcttcttggagctcggtgacaccggtccctctaaggcccaggtatctcagta

SEQ ID NO: 51223 - DNA, 805 bp, Oryza sativa
tgcagccctgtgtagagtccaactaagcaaattattcgtcttccctcgccatggatggtagacatgttaattcgtgtgtccggcagcatgctcacatcatcatacttagaagaaaaaaaagtgcccttcatgtatatacatgtaactacctcatgcccctcttttattaaagaaaaaaaggtctatacccatgcatgcacaccgggatgcaccggttagccctccaatttgttcactccatggacgggatgttcctttgctctagggattagataatttaataagtacaaataagtatttgaaatcaatttttattagtaaaatatccataaggactgatctgtagacaccctctgttcttcttcttttcttggtgtattagttggatttaagcaacgtgatataggtattttgggatataagttaatgtccaacttccaaaggattaaggtttcccaaccctcagcaccgaacacagcataagatcgtacatttatccttaaaagaagatcatatattttatcagggcattggaattaagtaaatagcatccacatatatgtcaagagatataattaagttggttgtgagtcaataggtccattgatgctataattaaggttaaggttagcggtttataagttattttgattttattaaaaaactaagttggatattttgatttgtaatgagaacttttaggattttttgcgtatggatgtgggtccaaaatataataattttattagcaattaaatatggttggtatagatattaaactattgatttaattaaaaaaaacaca

SEQ ID NO: 51224 - DNA, 824 bp, Oryza sativa
ctattcaataagaacatagctgcttgaacaaaaatggtcaaggtattgaagcagcattgctagggagtgcttatcacaacaatagtaaaaagggaagcattcgtctttcaagtgaaacatccagttgcgtcaaaaataaacattcagttaatggtttttgtaaagacactgtctccaccttttttttttctgatcaagaggcgtgaaagcctcccatttccatctactagaaatgatagagtttacagagagacactgtaaactctatcatttctgtctacacctactctctctgatttctgttacaagtcagtttagtcttttcagttttattctaaatataagccaattatgaacttgtatgcattttgtttcttttgttactgctatgtcattgcttaaatgaatggattttcatcaacaaatggtttgcctttcccatgtatctcctaccccatgtctacatgcacggatgcaccaaattccccaatcaccatagaacagagaagttagatgttagcttaaatttatctaagaaaaagtaataatatagaatgataatggttaacatattgtcatttcatagactaccttaattcctatgtgcaaatctgaagggacttataagtacgtatgacatcagtgatggaaattgcagtgtatagattgcaaacactgtagatctgtatgtcccatatgttatctttaaagattccataacaaagttaagcacagaatatatactttatactgtatagaagccaaaagttattatcataccacagtcacatgcactctttaaagataccataggctttaggaaa

SEQ ID NO: 51225 - DNA, 772 bp, Oryza sativa
taaaactgtaaggtttaaaaaactgaaaaggttcatgataaccccaataattgtgatgtaaccgataatatgttacaaactctttcctaaactgttcaaagcaatgcacgaagctcaatagctcatagtagtattgactagcatatccacgtgtataaagccaaggatgatgagtgtaaaacctagtgaagggagttatatatctactccataaatctaacatggcatctagagatggttcctagcaagcattgtagtaacattaaagaaaaatgctacgctatgatcactcagcatgcatgggagcatgccagctcaaggtgtgtacctgtgccgagccagagagaggctaggcctgtcataaagtacatgagtacactacttgacattgtatgaacagatacagttactaacatggaccaccgtttcatcagaaagtggcaattttaggacccctctgaaatgaaatgaatggttgccataggaattttggatgaatcaattttgtaagaaaattttcttatagaaacatttggttcataaaaaagggaggaataattttcataggattgcatttctatatgtctcaatttcatagaaaaataaataagaggtccaacttcttaaaaactttgatttgctttttttcttcatgtgatgttctcaaattactcctttttatctttcccttttttttctatagtgttagaaaaacatgacattttaattcctattcttttatatcccgatattattttccatctggaccttg

SEQ ID NO: 51226 - DNA, 1180 bp, Oryza sativa
gcacggtagatgaaatgtatgtgtctctggcctccacctatcaaccagtgccataagtagggacttgtcgatattttgtcgtcgttttctatgtgcccccatttgtttttgtttaggttctctagcgtcgtaatgcatccttgcctgcgtcatctgcacgaaggtaagaagacctgcagctgacaacctatgaggaaatttattagtcacattaggcaatgttatagtacgatatcatgatgttgcaaactttaaccatttatgcacctcgcctcccatcgtcgatcaatcccccaccatccggctgtacgcggtatcaggacagctagactagagcaagaatttccatcatatatcttctttgcacgatgtcatgcatcgatctctttgctaagcaacgagtaaggccactctcttccatatctgcatgtacatcatgaagggtaaattagaaatttcatcaagtgcacatacggaaaagtacatatgcattaaattaaggaataaaattttctcatagtacaagtacaaactcgagcaatatcattgaaataaatagtacaacaataggattacaaacgttacaaacttggtaacaccttacaataaaatcttacaacattaccataataaaataaatattacacatacttattgactaacatattacaaacttattgaaatacaacgtcatgcagcgaacatatcatgaccgaacataaataaccggacagtgtaggttataactactgcaggtttccttcctccctatcgtgagcaccctgagagccccttctattccttctcgcacgttggtgcataaggtccatgggtggagatgtacccctcctggtattcttgccatcttcttatgcgcgggcccgacctgaagacagttctcacatcggcttaacgggccttccgctttcgatgcttccatatctttcttaaagcgacgtgtttgtcttctaccttaaccggccttcaacaaatccaagtctggcacatagatcctggtatcaccccaagttccgactaggtgtgggagggacctccacccgaggatctcagcactccatgcatttagaactctatcctttaggtagaacgtcgacacgtatgatgttgaatcaagcttaattttagcgcatgcggccaggacatggctacatggcttatg

SEQ ID NO: 51227 - DNA, 643 bp, Oryza sativa
tttagtctcaaggtctatgttcttaactgtgtgatggatgacaggatgaacatcattattttgtttggtaatatgtactgcctccctttgatgtaatctcgtcaaaactatatgtagtagcagtttgtgctgttatactatctccctctgttcaatggacagtatcaagtttggtttgaaattagctaattgcatcataccatcaggcggcagctacggctccactggaatttaacttcaattactaataaaatcaattcgcataatcaccacccaaagatacacgacttcaattattaatagcaggcaccatattgcctaaacacaacatgcgtattcaccaattccttactaatatctatccgccggcggcggcagcggaactgagaaaaggggtcggcgttgggctcgggcactcccagcggtggcgtcaccttgcttttagcaatttgggcgagaactcatgacagacggaaagggattgcggcgctctatatcgctattggcgatttgggtggtgccgattggaaggaccaatgaacgataatcttgtctattgacttatttttccaatcatgcccctgcttaatcaatggctagattagattggtacctcatggtacctagtacttcatggtacctc

SEQ ID NO: 51228 - DNA, 819 bp, Oryza sativa
tgtttcagttgttggtgaaagttgtgcattctctctggtcttcgtacattttccacgtagaccgtctgttgatggttgttgcgaattgggcacatatttccacggagcttttatgtcttcccttttcctcaattttttttttaaaaatgggcatttatatttctttatcctcccgaagttgtgttttcttggaattggttatcatctttacatattgtccacttatcggtgcattgtactaccttgctaacaaactctagattaatatctttcttcagtaacttaactgttattagtgttaatgtgtaggcactaggcagtactgttactgtatgagatcagtgtgtggggactgaattgtgtgtctagattttctcgcttaacagttaccaaacattgtcgatgcccatgtgcattttatcagtatcattgataggtaaataggaggggaaagtaccaaaatacactggaggagacaatattgtttttcatttactttttgctgatgtagaagcagattattctactagtcaagaacagtaggtattttgcctattagctgtattgcaatgtagtaacagattgtggtgtgtatgcagatctcatgctcagcactgaatgcgcctgcagacagcactgatgaagaccagggataggctggaggagcccactagcatcaagaatggtttgtcaaggtgccatccctatgtccattttcctccttattcatgttctggaccacaactgcatggatccactatggagttttctatatgtaaatgtgtttctctaagccaagtagtataattatgtttatat

SEQ ID NO: 51229 - DNA, 614 bp, Oryza sativa
ttttatatattttttcttaatgacctaaaattaagttgaaaaataaacttcgatgaaaaaaaaatcccaaaatcaactccaaatttaagtttaaaaattcaaattttgattaagcgaaaagataagtccgattgtgacattgttttcactgagggttatcagctccaacaactcttatctaaactcctcagcaaaatcggggaaaggctgaaagaaccacttaaactcagacagattaacacatttctatcatcgtatttccaaactaaaatccaactactgctcataagttcctatcacctttattattagtggtggagtttgagctaactttttaaagggaccaacagttaaaaggagaatgaaatacataatatttatgggaccattttacagtgtctccataatcctttgtcccgattcaacttggcctttatacattttaattttttttcacaatgcacaattgtttcatatacttgtaaaatggttgcaactaatccaacaacttcacttcaatgcctgcaccatatcttctgcaacttttaagccacttctgctgccatttgtctccttccctgtgactgaagttcttgaactgaaataaagaaaaa

SEQ ID NO: 51230 - DNA, 646 bp, Oryza sativa
aggaatatcgtgtcatttcaatggtactgcataactaaatctacaatctctgatcgtgcagccacagtgggcgagaatccaggtgcacaatgtgtacgagtactttaccgaggcgttcgaaagccttagggaaaatgaagttcggtggactccgtacacgaacgaagaggccattttgcgtgcaccgcatggagtaagcatcttatgctatcacgatgaagcgtactggatgacatgaaaaatgttggtgtacgacatattcgtcgaggggtataatgttcaaagggtaatgcgtcagatgggactgtaccaacaagtcccagttcctgttggacttcaccttccaccagatgtgcacacgtatgttgttatttcaatcctgtctaatttctgtgcactaaaaattgtcagatataactaatagctaattgttgtatttttgttgcaggcaaaagaggcaagctgacaacaggtatcgtcgatctatgcactcaaggatgaccccatggatagaggcgtggtcacaggccttgaatgatgtcgtccaggagaccagggcatcgaccacaacacttacgaataatacatggcctggtactcatcgcagactctcatccggctgcttgcaccggaggatcccgacgag

SEQ ID NO: 51231 - DNA, 527 bp, Oryza sativa
ttgctctaattctactcgtcgttgcaattctctctgtaatttgggtgtgagttgtgggttgttacacagtttatgaccagatacaacaagcaataagtgatttacttgaaccttaattaactactcgatccgtgcaccagcagggttcacgatcagaagtttgggaatcctcagatttccaagcaacgcacatacgctatgtatctataaagttcattctctcttctctcgtaaagctacataatctcaattatttttaacctttggatgattcatcaaaggtgtaaattacatctcttcctctcaaaaggcacaccatacaacccaatcatttataacatttggataactaataaacgtaaaaaatatataaacacatgaaaaaaaatcgtataatacgtaagaaagaaaattttagaactcatatctactatattatcacacaattcttccgtagcaacgcacatgatacccatatagtacaatagatgattctctctggttcgcatcttctccacacctcacgg

SEQ ID NO: 51232 - DNA, 760 bp, Oryza sativa
agctcgtttatcttctttcgtatgacagtatgaaaaaaatgctactaaagtcgcatttacactagtgattgttttgtgaccacaaattgttcaactatgacacctgcagatactataagcatgatgcattggtacatattttagcttactcagaaggcagagtgcccacaaatcatgttcatcccatctccagcaccgaatgcgtggccatggataaaatggaaatgaatccaacttcgagaagagtaatctatgattcacgtcgtacaattggccaacaattaaagctttatcaaatatcagttatccgtgtgttgcttcggataatagaaatatatttaataatatctcaaattttgcaaaattataatggcatggttccaattttcccttctattaaatgtgttaataatatgtttgctaaagggaatattgatcctaatttaattttatacatagctttccatttaatgcttgtttttctaataataagatgctcaaaggctaatttatatattggatgggaataggtggggtggcagattcactgccaccagcactattttttcaaaggagtatagaccatcataataccagcgtgttacaaaggatctcaaataattatatttgattattgtgtggtttcattggctaatcaggtgcgaatttggtttctggataactggatttgctcctcctttggttcctgtccgtttcttgatttcctccggctttgcattgattaattccactgctctgg

SEQ ID NO: 51233 - DNA, 656 bp, Oryza sativa
aaggtgtactttagcatctccaatcagcgagatggctacactgagacgcctcttcatgccaccactgtacttcctgacttgcttatcaggagcaccaccatgaagtaaatttacacttcttaaagattcgttaacagcctgcaaatcattttcatttcagtaaataactctgaaaggcttctaaatagaaatagtaggaaagcgtcctattcagtatattatactagtaaatttagaagtactgtgtcaaaaaacacatactgaaaatatttcaagacaaatgaaaatgaaaaaaggatgatggagaaaatcagggaagactatctagattatatccattttttcagttcagagaagtattttgctccatgaaaacccatgcacttgacactttatgcttcaaacactcttccattcttaatacatggttcagtgctttcgagcatccactcatttgttcttaattcaaatcctataaggtttctttggagtataaaaatccatataataaagcacatctacgggcataagtattgaaagacagtacattgatattaagatatgctagcttcaccttaaaaattatgctatcagaagaagaaataagggacctggtatacttgatataacttacagtgtccaaatcagagccattg

SEQ ID NO: 51234 - DNA, 1032 bp, Oryza sativa
agtaggaactccctgagtcaaccaacatgagtatctcagtgccttgtatccatctctcaaacgaatcgacttggaggattcagtaccccacagagcctgttgggatatagccatcaaagtaccttcatcttgctctttggttccttcaggactagtatcattttcagaataagattcagactgcagagcctctaacaattcatgtacaacatgtaaatgtactgtagtggcacatttatggtccctaccccatctctcaccacaaacaaagcacaaccccttagatcttctgtaggccttgagtgaagccactctgtcctctttaggtttggttgattcagtcaccttaccaccatcagaagaactaccaggaaaaaatttatgccctggagtggcaggaatgaagctagagaatcttggaacttgtttatagacagatggtgagtcggctcttttgctaacagtgggtttgcaactatccaggatttcttcctgaagcagagcaattgaacaggcagagtccaaatcctgaggcctctgtaacatgactacccctctgttctcatccctgagtccttcaatgaacttggtaacaaagtacacaggtgtgagggcactatcataggccataagctgatgcatgatcttatcaaaattttccacatattcagcaacagtgctactctgttgagcatgaaaccactgcctgattagtgcctcctgtctgtccctagtgaatctagagcagactaattcacataaagtgacccaggtaatgtcaacaatctgagatctaatggactggagccaaaaggcaacattaccaacaaaattaagagtagccaccttaacccaatacataggatatattccatagacatcaaagtactgcttgcaattacttttccacatctgggggttagatccatcaaattctgggcagatcattggggggatacaagcactcaaatcatgattggtaccagtggatgcagaagttggtgatggcaattcagactcggtccttaccag

SEQ ID NO: 51235 - DNA, 1335 bp, Oryza sativa
caacccacaactcacacccaaattacagagagaattgcaacgatgagagaattagagcaagaggaattatggcaactcaatatagtagtcttctccgattccaacaggaatggagccgccgccgcctacgccaccgtggttgccattcaagtttccctcgagctcgctgatctgatatatatatcctatctctctcttctttccccttgttcacgctagcctattacaatatggacttctattacatggcccagttaggcccacagtacttggggttttgcttaacaggccttgtagtacgacgcagattgcctccctttgactgcacagctccagcttgacgatcttcaacttcgtcagagttttgctccccatcttcagtcaatggaacatcgccaggtaccgcctgctccttgacataaacatgcttattttcttctccgttttgttaattttgccactgaatcttacagatatatgttgttcatcccatttagtagtgcactgtgatagcacatcatcacaaactaggagagccgttggatctattcccaatggcttgattgcagtctctcatgtaacgggcacgtgtgctcttgcatcgggttgcatggaaattattgatgtctaaataattcctttttcaaaagcgtgcaagccaacaattgtttttatggtcattttgttgaaacagaccattgacaaataaatcttaccatgtgcccttcccacatattgcagcgaagctatatatgtgcacatgattttgaatatgttgtttatgtaggaattatggtaaaaaggtatattatttggtcagccttcaccgagatggttgtttacatttgatttttccaatgttttaatacatatgtatatctagaacaatgatgttcatctatcattttgcatgtaaaaaaatcttgtaaaattcgcatttacacttgtgattttttttgggatttctttttgggaaacacaaattgttcgacataccatattatgacctgaaactataagcagcattggtggttcttttagcttattcagaagttaaaacaaactatatatttgtggatgtgttctagtgttctaacggatgatggattatatatgaactatgtttattacaataattcaagggcacaacaaaagaatagataatcattttccgttaaaaatatattatagtgagtgatgaacctatcatcgcttactcccaccaccacctgatatgtgggttctattgaatagtgagtcatgcaaacggttccttctcaaacctaaacatgttcaaatattgtttgtagcaacgcacgggtgtatttacctagt

SEQ ID NO: 51236 - DNA, 1424 bp, Oryza sativa
ttcagttagcatagatcagttcaaatccttactaaaatatagattttattttttattttttcttcaacattaaatcatataaaaaattaatcattgccgtacatgtgctatcaaatgttgtatatgcaacagtaaatattcccaaagtaaaagatgaaattggtgctactccaatttgtcaaaccccgccttggcaccagtaccgcgtacaatggtacgggagacagtgtgccatggaagacagcgaacacttcagcactaatgttaactgcaggagtttaagacatctggaaaggaaaaaagggcccaaaaaacacttcagcactgtcacgagcttcggtgagactattttgcggagttgaatgtaaagcgtagccgtggctggcggaagggcaagggcaaagttctcctcgtcatcccgacgccgtaatggcgaagagagagatagattgaataaatttcttcttattcgattacttcctcccaatccctttaaataggaaaatcttacagataacaaaactcaatcgtatcctaatctgaaagtattgattaacatcctactaacttactaacaaactctagagataaaacgaaattaaactaaaacattatccttgtttaacttgagacttatgcctactctgatacttacgcccccacatgacaagcactataattgtaacaaaaaaaaaaacctgagaacctctagatgcatgaagataatgggaaaatgacagtgaagagaatctgataaagggttgaccaaacagaatttctcagagaaaagtaaagttgtctctggaaagatcaagagccgcaaactgcggcgccttttcagctttccccccacctaaagggcacagtgacattattctcttctttagaaaaaatgatatggcattgctcacacatgtcaccttgccacagaatttgttctggtccactacaatctaatggtccattttgtaagtaacataccttctgttatttggcaagcctagctaacgctgtatatgaacactacgcagtttcttgcccaaagagtaggtcagaaaaaaattgcacattgtctcctccaaaatcacccatatgcaacttgactaaatcgaatttaaaccaatgagcatcgaatattgacgagtaagtggtagggcaatctggaatgatgagtccaggggtgaaggaatgttctctcagaaagagattaatccaaagtcaaagagggaatgggcatgaattctcgctgcctatcagccaaccacttagcgacagaaatacccaacttgtgaatattaattgataataagagaataggcatcagtaacttatattgatcgatctggatacagctcgcgtgggagggaggaacacatatcttggagtactgttgattcctccaggtttcctactaaactgaattc

SEQ ID NO: 51237 - DNA, 6766 bp, Oryza sativa
ggttagctctttctattctttatctaggacaatgacactcattgagccgcatcatgttctttgctacggactgtttgtacctacttagatatgaccaccgaaacaatactactattgcaaatttggatgagtacatttaatatattactactttaactataaattatctaacggaccgtaactttacttaaatacaaaatatttgtaactatcagttagtacaaaattatctataaatttatcataacatgataaattaatagaactaagtttaacttcacttgattaattacataatcaaattaatcataactaccaatttattatagtataaaactatttgcagcgacataaatttatttaactgcactttaattacaatatcaaataaattacaaactgtctattaattacaaactgtcttccattatagtaccataccttgtcttgccttcttcttttcaaccaatttgctcatataaaagtcccaatttcaaagttcttcgtactactgcatttatttgttcgttcgtaacaacctacaatgtaaagcacgtgtttaagcacaccatatatttcccgctacttaacgaatatttataccttttccatttctcacaaaataaataaatgcatgaactactaagtaattgtaacttaaattactacaaattaattacaactttaatttaattttttgtaccacatttaataattatcaatactattaatatcaatatcaataactacaaatataactattaatattttattttttttcatttcttacatataatattggtcgtatatataaaattaaacatcacatgaactactaattaattataacttataattactactacgtacaaattaattctaacttatattatacttatgtaccttataaattaattatgtctatctatattttaacccgaatcgactctattaacattctacatttctatttttacatacgacctaacaaaatataatgtagttgtaactaatacatacctaaatttttctctgacataattacaaacaaatattaactacgtgaactaatattttctaaatcctcatcgtacgaatttgtgctaatagaaaactaatcaacttacgtgtctttttttccttctctccactgcatgcactgcctcctctcttctcttgctcttcctctcctcagttcactcccttctgtcttcctctgtgaggaccatctcctctcctctcaatttaagcccgtgagcgcattggattctaatgctagcagttacaaatggccggcatgatgtgactgcaacagtaaactgataagagaatgcacagagctcttccacctctccctaaaaagctaaggtagatggctataacccgtgcaaaaagcaaaaaagaaatagagatgggaaacaaaggtgtcaatggagaaaagcggcgacgctctcgcgcatgcggagcgcgataccgagggcggtctcgcacgtgcataccgcgataccgagcctactgccgcgccctccatgcactcgctctcgcccacggtctcgcgcgcgcaaaccgggacatcgctcggtctcgctccctcaaagcgcaacagcgctgccccacctcgctcctcgctctcgcgcacgcgtatagcgacatcgcgttcggtctcgcgctcccaaagcacgatgccacgggcccactgccctcccccaggctttctctctctcgcgcatgccgcatcagcagtctcgcgcgcgcaaagcgcgataccgcgtgcccacgtcttctccgtcgcgtcataaccggtctcgcggtttcatattacgaaaccggcatcggtctcgcgtaacgaaagtgcaagagcgatggctccgcccgaggtagtcgtggggatttctccacgtggcgctctcgctcgagggaaaagcgataccgcttcggtctcgcgtctcgcttgcgcgagagcgccagctcaacttcgctatcgctctatcagatcgcgatttcgccacgctatcacactttcaacgagcgaacatcggtatcgctattccaaaaagcgataccgatggtttatttccacaaatcgttcgctatccggtatatttttgcacaatcaatcgataaacagtataatttcaaaaaaatttcagtagtatgtagctaggtttgcttcgtgcagctgtgtgatccacctgtccatgttaagagactgataaatactaactgggcagaagcttcagaaccatgaagatagaactgcctctgtaccattaatattaactgtcttagttcacgtcaaaattagaattttgattgaaattgaaacaatgtaacggaaaagttaaaagtttatatgtgtagaaaagtttggatgtgatagaaaaattagaagtttaaagaaaaagttgggaactaagaccctatttagataagactaaaacttttaagtccctatcacatcgaatgtttggatattaattagaaatattaaacatagactattaataaaacccatccataatcttaaactaattcgcgagacgaatctattgagcctaattaatccatgattagcctatataatgctacagtaaatattctctaattatggattaattaggcttaaaaaatttatctcgcaaattagttttcctttatgtaattagttttgtaagtagtctatatttaatactctaaattagtgtctaaatatagagactaaagttaagtacttggatccaaacaccacctaaaccatgccttagtttctggaccaggacattgcagctagcctgacactataacagcacaatcatctagaatcttttggaggtccagcctgcgagggtctggaatttgtgtgtttgttatttgggtggaaagtttttaaagtatacggacacatatacttgaagtattaaacgtagactaataataaaactaattacagattccgcctgtaaactgcaaaacaaatttattaagcctaattaattcatcattagcaaatatttactgtagcatcacattgtcaaatcatggtgtaattaggctcaaaagattcgtctcgcaatttacatgcaaaatgtgtaattggttttttttcatctatatttaatacttcatgcatgtgtctaaatatttgatgtgacctttttaaccaatttttttaatttaatctaaataaggccttattggttttgtgtttgcttattgattaaccctatatctgactatctgactaggtgtgtctttctccgatcaataaaatggtggatttattaatgcaacacaaatctccgagcttctaaacggctaacggtgtaattttcataaaaaaaatatatgtgaactggtttctaataatcattttaaatttatttttattttataatagttaatcaattaatttgtaccctcgaaaagttaccaggagagtatccatctactccctccgtccaaaaaaaaaactctggtttccgtgttcaacgtttgaccgtccgtcttatttgaaaaaattatgaaaaaaattaaaaagacaaatcacgcataaaatattaatcatgttttattatctaacaacaatgaaaatataaattataaaaaaatttcatgtaagacggaccaccaaagttggacacaaaaatctaaagtttgcttttttttttaggacggaaggagtattcaacattcagcatatagtaataataattcctcagtgtgcagcaaagcttctgaattcttgcgtacccagactagttagcagcagtcaaatccacatctttgatctacgtacagtaatgcagtttacgagcccgggcgactcgcgcgcgtacgtgtgaccgctcgtgccgtggacggcagcgcgccgctcgctctacgtatacctgcgcgccacacacaccgtcgtgtggtcactcctttttttctcgggcccccgggcgatcgagcgggcgcgcggtagcttcgcgaagcgaagcacctgaatcacctgatgtccagagaacccacgacgcgcgcgatggcgatgcggtgtcgatctcccacggtggcctaccgatcgatcaacacaacacacatcgcccaccacacgcacacaaccacacacgcacacggtgtcgcgcgcgcgcgcgcgagggccacacgcacgcggacgcggtgatgcgcgagacgacgcgcgcgcggcgctagctcacacggcacggcacggcaacggcagagaatctcttcgcggctcgcgggacgggacgcgtcgccccggcgatctgatcgccaacccaacccaacccgccacgcccacgcgcacactccccgcgcgcgcgcccgcggctggctggctcgcagcgcacgtacgtggccacccgcgctctcgcgtcgttgatagacagggcgcgcgcggcgccaacaccggccacgccgtcatcgcggggatcaagcagaacacatgtttgatacggctgttttatcgtttccgattaagatacatattttatcacggttttcactttgtgtgagggctatttatttcgtgcttaagatacatattttatcttggttttcttttttcaaatggtttgataggggtgttcaattctagatacatattttattccggttttcgtttttgatacggttaaacgttgtatttcctgggaaaaaattatatcgaaattgctataacatatcgtatcaatctattttcaaatctgtaataaataaagtgttcttttatcctaacttcacctttagtcttttgagtgatactccggtgctctctaccagtagtattatactaccagtagatatgatctgaaccgtttgttacaaaaattaaattaatactacctccgtgattataagacattttgacattggtcaaaatcaaactactttaagtttgactaagtttataaaaaaaataatattttcaacacaagacaaattattatgaaaatatattcaattattgatttaataaaactaatttggtattataaatattactatatttgtctataaaattagtcaaacttgaattagtttgattttaactaaagtcaaaacgttttatagcctgaaatggaggaagtaatttattaagactaattagggataactttgtcatatactttttttctttctagatcgatatgtggtcattcattttgctggtatcgcttatattccgtaaaaaaaaagttggaagttttagccactgctaaatgctgattatacctttccataactattttttacataatgccctttatatttatactctcattagcagggatagtagtacaaacaaatttaaactttttgattaaatgatattaacggtttagattatattcaagtatcaggaaatagcattgtagtggggctcagcatcctcagatgttttgggtaagcgccgtgtctaaatccaaacggtggctaggacgattctaacacttctttttaagtactaatcaacaatttacaattggtctctcgaagcgtggcgcggtgtcgcctatctccacccctcaacgaaagtggactaggatattttcctctccgttgatggtgggttgctttaccgcgacgtaaccacgagatagtcacagcgatttatacccacaatgtggtcatcaaccaatacggatcgatctccttctcataccacgagtatataatattctacgattgtgaccatattaaaattgcaaggccaggagaggatgacgagtagtaccagtggtggcaacgtacgacgttcgtgttggcataaacaaacgaggggactagattcgatcgcccaaatcttttaacagctcgtcagcaacaagctgaaccccaagcatatcgttctctctagccacagcaatattttactaaactaaaccgcaatttgcagtgcgacgagaaggggatggaaaggattttttaatttgatcctaatatataacaccgtgcgtctagaatcgtcaaacgctaaacaaactcacaagtggcagatggaaatttcaaacaaataaatccatgcccccaactaggaattaaacaaatccaaccccaaccgaaaggaaacagcaattccatcgatcagctcccatccaggacaggcgaaagaagaagacgaattaaacaccagaaacaataaccaatcgtgacaacaaacaaaaccacgaccaggggaggaagtgaccggccggtgggcgctgaattcgacccgggacgatacgaggtttgtgtggccaccaacgcctctacgatctcccaacgagcggctccaattaaccaattttaggccattagccccccataaccacttgtgtcaatgtgtgagcctgatttgatcctgctaataaagtatcccaactcctccatggaaatccctccaagtgtcgaccacccatcgatccaccgatccaacggtgtacgtttatgtgtgtgtgacagccacagcgacgttgcgaatcctgtttcgttagagagcaggtacaacagcacactataaaccaactctaaatatattttaaaaagataaaagactagagagaaaaatagcatactacatatttgtaactagatatagcacggactttaaagacgcagtttgtgtgtgataggtgagatcaggtattagtagtgttgtatataactattgtataaattgaccgtagatgatttcgagctagtagctggctatcctattaaacttgctcttacgaaagattttcgtcctcacattccgtttcccatcattccatgtacgccgctg

SEQ ID NO: 51238 - DNA, 514 bp, Oryza sativa
cggaatcaccattagctgggatcatgtgaagccacatcatcagaaatatagcagccgttggattgttgtgcatcttaaatgtcagccgtcgatacaataaaaatgctttactgattactttaactgctgtctcaccatggcatcacctccatggcaaccctgacccttatcaactattttcccccattgctttatagaatcaacagtagcctaaattgcatggcctaacctttctatttatatgtgctacgagtcaatccaagtaaggtataaaattttaattatcgttgtccaattctggttctgccttgaattttgggagaaaggtactaccgatgtgctgaccatgtcttctctacattgtagatgagatcattatggtagtgtccagactcgtgaaattacaagtgaaaatatccaaactgaatgaagtttgttttgctataagtgttcatgctgatttaggaggtcagcggtatttttttttttgctctcgctgaattggttttcattt

SEQ ID NO: 51239 - DNA, 548 bp, Oryza sativa
cataatattgtttactaaacaaagaagatccatgctgctaattagtagaaaaattttgaaaatgaaaagaaactaatagttgctgtaaaaacaattgttaaaatatatcaggtaaagtaggagaaaaaaaattaaaaccatatgtccatctcaagtaccatgagtggggaaaaaaagaggaaataaaaactgaaaaacttcaagatacctgaaagaaaggaagtaatgcctcatcagcaattgtatcgcttcgatacattgattatgtggtccaaaagcgaaaaatgtagcagcatatacataagtcaagtttacgagaaacggaatggcaccaaaaccaactcacctgcactcctccagctgttatactccctccgtcccaaaatatgaacatttttgaaatagtgccaagtcaatcatttctaactttgactactaatagcaagaaaataaaaaagatcaatcgtgtaaaattgatcttactagatttataatcaagctatcataatatgtaactctttttatttgatttttttttatttttatag

SEQ ID NO: 51240 - DNA, 636 bp, Oryza sativa
acggttaacgtgggagctctacgatatcactacggatgacgatgtggatgaaaaaaaaaagctacgaaaatcaaaatccgtcgtaagtttttttttaagaaaaaacattcaaatgtaattataatacaattataatataattatactataactactgttactatagtgtaacaacatgcaactatgagataactacactttaactgtaatttatatattcattgcttgtaagagcaagtataatagtaggctataagactaaatgctgaggtggaggagagaagagaggagagagaggagaagcgagctataaacttatagccggcttggatataagaacaaagaaactctgtgaaagagacaggtgggtcatatattaattgtaaagagctaactattatatggatgagctgagagaaagttaccaaaaaccttatagccaataaatcggttgtattattacccttactctaaccaagagaaaactttgatagctcggttgtgcatggcatatgcgcgtggtgtgagcgggaagttctgggttcctcttccccacacggctagctaattctttctcagctcagcacaaatcttcaagtgcattgaatggttaaaaaagtcgaaagttttcaacca

SEQ ID NO: 51241 - DNA, 693 bp, Oryza sativa
caagcgcattccattgatccaggttagcaagacttcggcacacaaacatcacccctaccgccctcctagaattagattaaaccatagaagcttcttgctacggaaactgttggaagccgttcatctaatgcatataaagcccctccttctatgaactcgtcgtcgacctatccatgaaatctccaccgaaacaagcctatcgtcacaaagcacagcgaactcaaatccatctctaatggcggatccacatttgacactcacggagaaacttcataccaccacaagaactagaaggttctagaagcaaaaccgcgacgcgcccgcagaggcaaattaagccaaccgcagcgagatagaaaggaaaaaggagggtaaggttccagaagcttccactcacctcgatggcttcgcacctccgccggcagctcggtcggtggcgtgggggggcgggggaggtggcgcttaaaatgaggggcaggagaaggatccagaagcggcggcgggttccactggaaggatctagaagtctcgagacggcgcaatataatacgcgagcgaatcggaaggtgggggaggcgaggcgaggcgagtggaattggaatttcgacgagagggagagggagagattagtggggtcgttagctgtgttagtgttaagtatatttattaattgattgattaattaattcgggg

SEQ ID NO: 51242 - DNA, 819 bp, Oryza sativa
ataaatttgaaaaataatttgaatttttgataaattttgtacggtttgtcgcggttaccgcggttaccgtgcggtaaccgtgcttaccgccggggcgcggtacccgcggccccggcggtaaatgaaaccctgctctcgatctttccgtttgcaatgcatgccacgcgagcgcgagcctagatccgcggcgcgaccggcggtgtgtgtgctgctgctacgccgccgtcaccggctttccggcatccacgtggtggggggctgcgtacgacggtacgacgacgaacatgcagtgtttcggggcccagacggcggtggtcggcaggcaatggctttgcttttggctggcctgcgactgcgggagggagaggagggtaacatggggagcggcaggtgggcttggggaaagtatttacagctcggcgtatgggacgacgattactggtggccggtggctgctgctgtttactgctactacaactgcaacccttcgttgccttgtcgatttgtcatccgcgcgagagcgctccgggacaaatcgatggtgtcctcactgccgactctctctcaagaagtcttgggccgtgtttggtagggctataaacttcaactcctagctctaaattgctatttcagttggagctagctcctattagagttggagacccatccaaaagtgtttgacaagcttttagctcccgatctaaaaaatattgaaaaaaaggaatccctgctgccggccgtgcgccgcccaagcatcgtctccacgcacgccggcctcgcgctacttcccctgcaccacccatccgcccttgtcagcgt

SEQ ID NO: 51243 - DNA, 1172 bp, Oryza sativa
gctcgttaacaagctctatctcatttgtatcaccattataattttaaatttaccattttatcatatactaacatgataaaaaacactaattaataaaggaccttcatgttctatctgctattttacgttactccttgaattggacttgagggtacagaattgcgatcaaagtgcagcagtacacaaacactggatttatatcgaatccagaaacataaattcatcataaaagagctaattattacattcagaaatgtgcctctattgttcagctcagactcatcatcttgcatattaccatgtgctgaggtaaaaaaaaaagtcaaatagctgggtacactagaaattattcctgcaatatgatctgtaatgtggaacctagtccactacataggttttttcctacatctacctgggcaatgagtgccttcatacatcgagggcacaaaaaggtagccttgtagtttcttttaacaatgcaagcccattaagtatgaggcaaacgcaatgttcactatggattaacagaaacaagcaaaatcacaaatgttttctgatagtttaattcagtgtaaagaaacaccatatttacctgtaatcttccaaaggagcctgtggttcaggtcttacagactccagttctaacatgaatgcactagaacaagattctctcgggtaatcctttgagttgtagcaaccaagaacctttgattcgaaaatggatagaggatttagaaaccattagtccagtggtaatagtaaattctagataatttggacagaaaaatgcataccattttccatggagcatgtgtactttggtcgcaaatattgatgtctttggcagagatggatagcttagaaacaaaaatatccccatctggatacatattgaactggatattgagcgcagacataataaactctaaataagacctcttgtctctgccatttgagcacggccggctaatcgtatctttctgagctaatttccagtcatttccctcgtacatccgccacttgacatctatatcatgaataagaacctttcctttcagactgcacgattcatcagaattcaagatgaaaatagcaggcttcagtttttgttgaaatatttgctcttctcgtggtttgttcctttgaacatggttttcatctattgtgggaaa

SEQ ID NO: 51244 - DNA, 1022 bp, Oryza sativa
cgtgtttaggtccaaaagttttggcgtgtgatatacagagatatatttgaagtattaaacgcatactaataacaaaataaattatagattttgtctgtaaactgcgagacgaatttattaagcctaattaatatgtcattagcaaatatttactgtagcatcatattgtcaaatcatggagcaattcggcttaaaagattcgtctcgtaatttacacgcaatttatataattaattatttttaggtttatatttaatactacatgaatgtatccgaatgtatccaaacattcgatgtgacagggtgaaaaattttggcagggatctaaacgggtcctaatgctgcatatggaaggggaaaaggcacgtgcctgaaatctagcaaatcccctgtggaaaaattggcaccggccaacgtcgtcgtcgccattaatgtgatccatggttgtattacgtggcatcatgcctctccccgccatgttggatttgcctcctcgatttgcatttgcatttgtatttcccgcctgaattttttttctgtgcccatgcgttgatgcgtacttcttaacttctatagtgcatatcttttttttaatgaattgacgagcgccaatttcattgaattgagaaggagtagctttacaaagcgaaaggaaagaaaagaagcttaggacctttggtctgagctaactaaaagaaaactaattacgaagatttttcgtttctgctaaggcccaagttttggcctcttccttgatcttggctagaagagaggtagctgaaagctccttttgttggaaggttatgcgattcctttcgttccatatcttctagccgaccaacagcatcaaagtgcggagtgccttattgggtgcctcttgtattttggcaagataacttttgcaggtgtcgttcatcaattataatcttttaggaggttttctttctctgttctctcctcgttgtattctccgtgtattctgttctcctatcctccagggcccctgcgcttgcgtaggtaaa

SEQ ID NO: 51245 - DNA, 609 bp, Oryza sativa
atgtaagcataaatttaatatcagtgaattcccttgagccttaaataaactatagattagcagcttagcagcaaccattcttaactgaggaatgaccaagaccaaagccacccagtataatcaagataaataaaacatgattagccatatttcagaaccatgtgaaagcaagataaacccccacaccctaaccaagtaactcacaaaatgatgcaatggaacctcaccaactgggcacccaccattacccccgagcagatggcctatggctgaggacgaaacatagcttggcctatgttcaaactacagcaacaacatggtaagctagtcaagcactcagaagtcagagaggagagagatggaccggagacgaaacatacgcacctagcggtgaaggggcgggcagacctgcagccgtgggcacccgtcgatcccgttggggacggtgtgtccagccaatgaagatgtacgccagcaggccttgatagaatagcgggccgatggctgaggacgaccgtagcagaagattgtgtggaaatcagcgatggcagcgatttcggctcgacggggtagagagacaaagaaacggcggcgatggagactgcgcgg

SEQ ID NO: 51246 - DNA, 701 bp, Oryza sativa
cccgcactgtgttgcaaaaattactaaacaattctcaatatatattttgagacaatgaatataggagttaaaatgaaaaaaaatgaaattctggtttatcagtacttatcatgaaacaaacaaatgatacccgcactttaatgtgaaacatattgataagtataatttaaatattataaaaatgatagataggtttgttaaaatattgtgtaaatgatgtaatggttgataattggatatggttacatgttgatttatagaattaaataaattgtagatgaagtatgcttgcattatgttaaatatgtaattattgatagtgagtgatgatgtgttattgttgcgcgttgagttgtaaatttagcggactataactttattatagaaaatataaataggtagatacatcatatcatcattagtggtaatcataaagcttagcatagttgtaaatgttactacttcctccgttccgataaaaaacaaatctaaataaaaatgtgacatcacctataatgaaccggataatctcaggtggtatcacacttccatctagattggtgtttttttttttgacagaggtagtactatgtgtttacacaggcgagttgaacaaaatactagttgtatttttttacagaggtttcgcggtgaggaccaaggggttgattgggaaaatatatagtacaaaccacatatat

SEQ ID NO: 51247 - DNA, 1245 bp, Oryza sativa
ccagtttagcttttagcacagttttgcacggtgtgtgtgtgtcttctgactcgtgtggtggcgtatatatagcccgcgaaatcgacgcagtgcaacacgtgctggcacgtcgagagcacccatagcggcagcagagatgaagcttcttccgtggaagcaggactcttcgatcccggaatacaagaatattaatcctgggaaacccaaatttccaaccaaaagaaaccccgaaaatttttttaaaaaattaaaagagaaaacctttcccggaatcaaaataaattttgaattggaattgagcccagtgggaaagtatggaaaactgaagatccggttgaaacacaaaattttaccgggaaccgctgaaatggtggaaactgctcccttcgtctcaaaataaagcaacctaccatcagatgggacatatcctaatatccgcctataataccaaaaacgtgaactttcgatgctatataaccaattttgcccattattaatgagaaatggatatatttttcacaaggccctgggactaggagggaatttggccggcgacaacatcgatctgcttgtaatttaaatcatttttctcggagaatttgacttccataaaagcgtgaaaaattgatagtactctcgatcgcctcgccacgccaccgacgatcgaaggtgcgtgctcaagtcagacctgatttagtcctggatcaagttagtcgctgtcattagatttcttgtcagcgtctacgtgtttggcgccaatacactcgcggggtgttcagttgaccacgggatgcagtgatgatatgcctcgaatcgcgcgcgaaaaattgcaatttgttccgatcttggcgggaagttaggccattcacattagcttcttcttaggcgtgtgatcgaattagtacttcctccgtattttaatgtacgacggcgttgactttttaaccaacgtttgaccatttgtcttatttaatttttttatgcaaatataaaaatacttatatcatgcttaaagaacatttgatgataaatcaaatcacaataaaataaatgataattacataaatttttttaaataaaacgaaaggtcaaacgtttgttaaaaaatcaacggcgtcatacattaaaatacggagagagtactagttaatcgtcaagccgacccgatccgtagtcgacggtatagccagcgcccaaccgctgacaattggtagatacagatagataaacaaggagagatgtgtt

SEQ ID NO: 51248 - DNA, 963 bp, Oryza sativa
gtttgagtatatagctaggttatgtatttaaaaccaccatgaattaatatatagacctagcagtagcacaatggggattggatttaaataaccaattcaaaggtcttacgatgtaaatatatttattctccccaccgcaagtcgtttctataaatgatttttgtgggggtatggatcaattgttgtataagggaagcattttgtaaaaaaaaaaaagagtgcaaacgtttcgcttatatttattcgttcagcttattagcaaaaaaaaataatattcgtgaataaactgttatattggtgtctttaacgatttattaaaaataagtgctataaaattaagtcccagaaattaaattttgacatataaatataagataaggctggaatctcattttcccacggtgattggagcagatacattcaccattcgtgcaagtgcatcatgccctcagatgtgccaagtcctcttcaattctattatatcatcagtaggataagtggcaaagccaggaatttaagcctgtggggtcaattactagtggtttgtatttaagtgaggtcatgtatctaaattcttttggattcatacatgaaaattaaggtttataggattttttttttcaaaaagctatgggtcagccaaccccacagaagaggcctaaatccgccactgaggcagatctaattgctagcagatttaactatttgccgtttaatttgatgtttaactacatgtgtcaataatttatgagccttcatatacctacaatatatagattcagtggtaaatagttatttgctacatccacgacgggcgaatagtctcatatttaaatatatcctaattgcttgcgatatcgactgcctggatgataagatttgaggaaagagaataaaagagagataaaactgggacacatacgaccaatgttgtcagtatccccatcgtaaaatggtatctta

SEQ ID NO: 51249 - DNA, 624 bp, Oryza sativa
aaacgaactcgatttggtttatccgggcgaaattggtctccgaaaccttaggggaaaggaagaggataaggaggagatgatttcccctcaactaatcggactcgggggcgaccgatagaggcggatttggcagagggaggcggcggctcgggctcggcttgggcgaccagccggctggaggtaggggatggccccgacatgtgggccccacatgtcggcggctaggggaaaggaggggcaagcgggtcggctgggccggcttgggccgctcggcgcgcgcgaggagagagggatgttgggccaaatacggcccaacggcttagaggaggatttttaaaacttttccaattaaaataattcgtgaaatgatgtttcatttattaaaaatacttcccttgctcaaataattcccagaaaaatctagaaaatagataaacaagcaaagtatttaatgaaattttatctagctcaattttatgttgaaatttttcttagattattagagtttaacttgtaggctttaaaagtaatttctaaaaatgatttaaaatatggattattaatttaggcgatttttagggcgtggcatgagatataaagcaatgctagtagctcaaggtttca

SEQ ID NO: 51250 - DNA, 760 bp, Oryza sativa
atgcaaagaggtaagccacatatagctgcactactatgctgaaatattttgtttgacatttctgttgatgtgttaatatatgatggtattgtgaaattcttgatgtcatgcatccctgattacacttgatggtgattgacaggtgcggttgctttcattagaagtgtttccattgaagctgtggggcttggtgtacatttggcggcaggagctcatgatatgcttctaaagacagaaagtgcccttacagcaattccaccacctttagcctcacgtgaagcaaaaagaaccaaagacaatgtaagagctaaccagcctgaaagtgcgcaagaagggctgaagaaggtattgaattcatccaaattgcacatgaactcatcttttctgagatgaactcatctgttgtctgctaataacatgttgctttaacctaactatttgcaattctatttttgtttgtgatttgcgtttactttctatatcaatatggtaagtactgccagtataagtttcatttgctgtgtaattatcaataattcaatatatgctgaacatttttcaggcatatgaaagcttgaccgatgggtttggaaggactgcctctgctttgattggaaatcctattaaagtttataatcgtggggctggtgccggatcagctttggctactgcaatctgtggagctccaggtgctgcagtggctccattatcagcgtcttttcgtgctgcacattatacacttcttggtataaggaatagg

SEQ ID NO: 51251 - DNA, 533 bp, Oryza sativa
agcatatgcttcggcgaagataacgtcggccgaactccctccatcgaccaggattcgccggacttcaaagccggctatctcagctgagaataccagcggatcttgatgcgggaacatgactccttcggcatcttccggcccgaaagagatcagctggttcacatactgtggcgccccctcacccgccgaagtgatgctgtggaccgctcggatctgcatctttttctgccttttggataattggcctggcgggtcagccctcgtaatcacttgcattacccttcgctgcgcgtcttgacgttgttcgaccgggggtgtttgttcttgggctgcttcgtgaggtgcttctatagttgctccttgctgtggtctagtatcttgcgcgttgccacgttgcctgatgtttcggcattgctctgtggtatgcgaagagcgtccgtggaaggcacagtaaaggtcttttcggacctttttacgaaccggctgttgatggttgctcgcttgctgggcgtcgaactccttgcggagggctt

SEQ ID NO: 51252 - DNA, 1828 bp, Oryza sativa
agtcaatccaagtaaggtataaaattttaattatcgttgtccaattctggttctgccttgaattttgggagaaaggtactaccgatgtgctgaccatgtcttctctacattgtagatgagatcattatggtagtgtccagactcgtgaaattacaagtgaaaatatccaaactgaatgaagtttgttttgctataagtgttcatgctgatttaggaggtcagcggtatttttttttttgctctcgctgaattggttttcatttaggtggatactgtgctaaatttattccatagcaaaattctaccttttgtatgcttgcaacagattactacaaattggatcattgatatattaatttatatttgcagactgatcttttgtctgctcaccagcttcacaattgattgatcaagatcagcgggatgcctcacccggcccccgtagtccatcaatcctgcccacaggcaaggtaagttgctctcaatattgttcctccattgatcgcatatattaataagctaattctacaacagccatctacatttctagatgtcaaccatctgtagtgtgtattcttatctttagtgctatttgttgtaaccaagccaaaaggcatggtgtctattttattcatgttaccttcaaaatcctaggccatattcagttacatgtatgttttcagattgaacaaatttgaccaaacatcagtacatatagactacttgagaatggcatgctcatgttcctataattttcaactgccatccctaagagaaaatacaacttttcttgtcacaactgttcagtaatttgcagcaatactgtaacagcgaagagaatggacaaaatggatcgatggtatcagcggtactaaagctgtgtagtaataaactattttttttggttaagtccatagtaaatgaatctaatcttcctaactattcattttttctcacctagactgaagaatgcatttctcttttacctatgtgtattcagaaatatatatgaggtgagatatgcagatatgcttcttctgctttagaaatttgtggaatacaaataatgaaatatggcaggttaaactatccgtgcatatacagtatgtcatcaagccttagatttttttcgagattatcagaaaatgttcttggagaacaagattactagaaaatggaagtgtcataaacatgtctacttgttttcttttgtcaaacagaccgcttttttggattttattttaaaactttgtgatggttaataaatcttgtttttttttgacccatcaagctggagaacctgatggttagttcctgattccattcaacagggagtctggcctgctgcatcggtcactgacacagcatgcggtttgccttcctcacacccaagctcctccaatctccttaggatttcctctttctttttgttttcttctgtgttttctcctatcctcctatgggttgttgtggaatcaggggggcctatggctgtaaggccctgtttgattcagcttaggattattataatctagcttataggagtaaactgaaacaaacaaatagattattatagcagattattataatctataagccagattattataatctaataagctgctttaaaggagctttttttagattattgagtggctaaagacccactacccttacatatttgagaaaaattacccatctatgccatcaaccgaatagatagctgagggcattatagactttagcctttcaaacccaataatccatccctccaataatccagacaaacaaacaactcacagcttattttatatcagcttattataat

SEQ ID NO: 51253 - DNA, 693 bp, Oryza sativa
catgtctatataacagtcctgtttttttatgacgatgagtaatgcgacactctgatttgagtacatccaaactgtcattcaagagcttcatagacggtcgagcagttttgggccacttgctggaaccgtgccaatagagtaggctacgtatgagagtggacctgttgtgccgaaaaaacaaaggccgaacaagagaagacgaagcttaagcaggaaatggctgaaagacgaccgtcttttagaaagaagtagtacaaacaaaaaaaggagactgatgatattagaaattggtttagaattaattgggtcattggaacaatagttctagttgtgctccttctcatgaaattatttgaatcatattggaatcttatttctagatatcatttagccatgctaactcacaatatattccccaacttacaatatcaatatccatttttaactcgatgcataaagttgccatcgcaacaggagacaagtttgttgatttcggctgctggctgctcatctcatgctcctcagggccaagcctgattgtactatgtggtaccataagccttgcaagataggttctaggttcgctagaaaacaaatttgttaaccttcaaacaagttcaggtgcacatatccaaattttccagaacaaacacacaaacagacataaagatgacagaagatcatgctctgtcc

SEQ ID NO: 51254 - DNA, 537 bp, Oryza sativa
taagcatcccatggaatggcttgaactttaagaaacttgatgcagatatatctcttaattcattagaattgcggttacaactgagcagtatccaatggctcatggatgtgtgggattctctccaaagaagaaatctagtacatgaacagagttatgcccataataccgcagacatatctagatctgccagttcatatgtatcaagctcttcaaaatcaggttcaggttctgtgatagctagcagggaacatttgacagaggacacattttctcaactcaggcaagaaaaaacacaagagccttccctgactatgccatacttgattccggactggattccagtgcttatccatgaggatcacggtgaccctgattcagtttgtgatgaaaggtgtgttcctttttgtttttcatcttcctttcttttcatgaaagttcaatgatattcactgcacctttgcatactgcaatccttttgtacatatagacatttcatcaagagtatacttatgacagaactgtggacaaataaataat

SEQ ID NO: 51255 - DNA, 1167 bp, Oryza sativa
atttaactaagtttgtagacaaatatagtaatatttataaaaccaaattagttttattagatcaataattaagtatattttcttaatatatttattttgggttaaaaatattacagttttttttctacaaacttaattaaatttaaaatagtttgattttgatcaaagtcaaaacgacttataatctgaaacggtgaaacagagagagtactagcttgtgtgatgagatgtcatgtcatgagtaaacctcaggtggattcatgtgaaaaaactgagtgaaaaaaaaaaatccttttactttagtcctgtttggttcccaagaaggtttgggtgtttagctgcagcccaaaaatggtggagtattgttaattctacctaacggagactataacagattctactagacgttgacttttacttgggcaatttgtggtttttaagctaaactttgtcagtgcatcttccatactactattaattgggattacatcaggtgctttgtgcggtgatcatcctactcactttgaatttggacgtaaagaagattgacgaacaattttgcccctttcatcaaagggtatatatcacgagacaacatctttgtgaaggttttgttccagacttttccaatgtgaaaacacaggctgtcaggaaaggtgaacactgaacagcttccatttttcacatccacccaatatatatgatagacaagaaatcaaagactaacaagccatggaaggtccaaatgctgccagatgctgatcgagcatagtgttctcagatagaacgattcaaagcagaacatgccaattgaacgttggattctcagaaataccagttcaaagacacatacaaacacaacactaagcgtacatcaccccgtgtgataggaaagcgaaaaccagcaaaataacataaactgctggctctgaatttgacatgttctacatcaaggcactgcaatgccacagccatataaatagcagcaggatcaaaggtaccaactgctcaaactacacaggtataacgcttgtatattaccttgagacacagatctcagtcaatcctcctaccttatatcacagattctcaatcagcaatactaacagcatgtctggggagtggtcagttaagctcttcgactgctttggagatagcggaacctgt

SEQ ID NO: 51256 - DNA, 743 bp, Oryza sativa
ttttaaacaacattttaactttttagaaatcaattcattcgtttataccctcaaatagctatcatataaatcagataattcataagtatattttttttcatgcgagtccagtgtgcaggtggcattcgatggctttcgttgcagacgctatgtttggatgggactccgaggtgaaagccttgctcggcttgccaatcctagcagcatgatgcccttggcgccgttcaccttctcgagggcattgctattggagcccttgttcaactccatatcaagggatttctctgggtgaaaaccatagattcgttaggatcgggtgatgtcgccgttctgtcgacgtgttcttctcgaagtcttcgttttaggtgcttttcccttgctggacggttgtacttaaattttaggttcactccgtcaatgccggggttttcgccggtttttcataaattaaccgggccgtagtaaggattttgggtccagttttctttataagtgggataactctcttcttcttcttctattgggaaattgcaggagctccctacccgttccccgcgaaaaaaataatgtaattatttttggagttatttttcccttactgtatagttctaatcgtcaaggtttccttctattctctacttcctatacgatgaaaataactatttttttaaaaaaataatatagtgattaccctcaaaaatatagaaaataattttatttacttctgaatattctacactttt

SEQ ID NO: 51257 - DNA, 653 bp, Oryza sativa
tgaaatattttaaaaagtttatgaaacatgataaaaataaaagttgaaacatatcgctatcacatattgaaacaaccaatgttaatggattgaaacatatgtttttctttcatccaaatataatcatgtgatatcttgttgtaaagatttaattacaaagaatacaacggtgtgatcggatcgtagattagataattagtttaagagaaaaatcgttttgaaactagctaaaatgcatgcatgcatacatgaggtggagagagagagagaggagaaatagtagtaacagttagttttgtgaattttgtgaaacacgctaaagacacatattgaaacatgtccctatcatgtatgaaacaaaaagtgttaacgtattgaaacatatgattattttttatcaaaatataatcatgcgacatcttgttgtaaagatttaattacaacgaatacaacggtgtgatcggattatagattaaataagtaatttaagagaaaattcattttaaatatcgttaaaggtgcatgttatatggttagagatagagatataggcttggatatgtgtatgtgtgtcagaggatgctgtccgatttttctccttgcttcggacgttcgaggagaagaattatccacaactagtaatatacctgtgc

SEQ ID NO: 51258 - DNA, 1137 bp, Oryza sativa
acggaaacgcaatgggtgaagtaggctggaagaggacaacgacaacgcgcttggggtttcactgggagacgatgacaacgactccccctccttctctcccactctcccgctggcctcatttcccccttctcccgccggcgcgacaggtagcctctcccccttctctcgccagcacgggcggtgggctctcccttctctcaccggcgcggccagggcagtcggtgtcacgcccagaaatttagcccaaatttccagactattttgtgtattaaatccctgtccaggaccagccagggtacacaaaacgacaagtaataaacagttccaaacgtaaataaagcgtaaaatacttacaaaagaggcacttagtcctcacaccgaaacaaaagcagcagcagcggaaaaaaggcgatcctagcggggcttcagctccactccacaggcaaaactcaactggggtctgagccttggtcttctaacttcgtcttcagctcagaaacactacacttctgaaaagggggaataatagcaaggctgagtacaaccaccgtactcagcaagccacaccaatgatgcagacgtgcaaagggatacaaggacggtttgtggctatttgcataaaggcggttgtgaaagattttattgagcaaaacagtaaaactgttgagtaattaaagtaacattaaatctccactgatcaacgctacaccacgttgaacaggcccaaccaacccacctaaactacagtgtattaggtcgatttattaagtgtgagactaatcacggtgaatctggtcgaccgcccataaccgcgggcacggctattcgaatagttttactctgatcagaggtgtacaactgtacccacaagacacagccccacgacacgtttccgtgcgccgacatgccaccacgacataccggaaagaggccgtgacaggacccttcgcataaccccctctagccaagcacaccacacctcaggtttcacccccgtccccagcgggcaacgggtagtcccctctcgtgcctaggtgaatccggaagcgacagaggccgtcgcagggcccgccccgctccatcacgcccacccttgcctggatgcgtcgactagaggaaagctacactacaagccca

SEQ ID NO: 51259 - DNA, 631 bp, Oryza sativa
ccaatagttgctaactatacttgttggcggatggcatgaggcccttcgaccaaatttgccgaaacccgtggcgaaggctatgaaccaaggatgaggcgaggcgaagggtcgcgtgagtacctgacgaagaaggatgacttcgccatagccagttcgccctggcatccagcgaagaaggacggcttcgccatgtccagttcgcccccgcaagggccgaagaagcctttttggcccatcaagcttaggggctatagggccggcggtcgcctgacggcccatcaaggacccataagtccccttgacattatgtaaccctgtaaacgtctctttcataagggcaaccatgtaaattcccccgtataacctaaaccctattagtaagaacatgtaatggggctataaatagtcccctagggccatgtaatggggggatcccaagtaaaattaaaaatttaatacacttcgtttctttcccaaccactgttgagtaaccacgtctttcgacgtatgcggttgtcgtttcgacaacagctggcgccgaccgtggggacctccgagcgaaaccactaagagcgaatgccaccgaagaaggtcgcgaacgagatggttacaaggcgaaaggaaagcgaca

SEQ ID NO: 51260 - DNA, 600 bp, Oryza sativa
attttatttctagagattttgggggctctaaggctccgagctgttaagtgttgttctttggtgccggttggatagtgtacggacacctggtctaaggtttttaatattcatttgtaatattatgtttgtgtagaaaaaaaatacttgtggtgctatttattttgcatatatgtatctagtatgatctagtatatagtttgtggtttttcaggatggtaacttagttttagtaccatgcgatcactggatgtttaactgctggttatttgaattattatgcaagttcatctacattattccacctattaactctactacttatcattattcttattacttttcatgtatattattactttgttagaaactacgataattgttatgatttaacgatgacaccattgatccaatatcctagatccgcctctcctagtggttaggagctaacgaggatgggggctggtggggcggggtacctcaccgctactgacttgagaagagggggggggacatcgagtgagtagcgcttgatcccgattctcgtgcgacactggtgtgagggatgtggttaggtttatgtcgtactgcatgaatcttaaa

SEQ ID NO: 51261 - DNA, 626 bp, Oryza sativa
ttcgttttaaaaaaaatccaattctaaatttgaatctggacataaattcaggattgggtttttttttacggaggtagtacggtgaatcagggaagagaactgacggtgaatcggtgatcgtctcttgtatgcgtatatggcagcttccaagggttccctgagaagccgagagtgtgctattcgtcggagaagctggtgagggaagggttcgagttcaagtggacggatctggacgaggtatttgacgacctcatcgagtatggcaaggtcctggggattctaccgcaatgaaccgctgatgatgctccttcactttggagtttggactggtcactcttgtgtgaaatgaagtcattgtcgtggtgtgttagtacttgtcacgacacacggtatggcaagatacgataagtacttctattgttatgggctctactacaaataaggaagcgatggatcggccgcacaaattaggcccatcacaatgcaagcgtcatatcccgcacgattctgaatcacaccacgcgacgcgacgcccgcacgggcaacagcgacaccgcactccgcacgcaggcacccgcgatcgcaacggaaaccgccacaaaatgctggtcgcgatgagccccccc

SEQ ID NO: 51262 - DNA, 1100 bp, Oryza sativa
tctgaccgtcgccttgtaaggtgtttagaacttttagtatgagtttggttcgtgactttaggctgcctacctcgggtataaatagagggggagcatgaggcttcccggtatcgctttggagagcaattgagttgagttttaagttagggtttcgagtttagtcgaaatttttgtaaggagtgttgttggtgcactttgtaaacacagagagaatcaataaagtcgtcatctactactctaagagttcttcgatttatgttttaccgggctttagcggtctaaccaacgactcaccgatggtaagaccggcggcaagctaggaaaccctctagtacaagaaacaaactttacataaccaatcatactaaatttggactccttccaaattcgacttcgcatcccatacgcacacaatacctccatcgtatgccatatggaatctccatcaaccacgtgcatcaactctagcctaagtatcccgcatgatctagaacgtgtattttaagtgtgcattgacacatctagaacaagtggttcaagtggtaagacacattcctactcctagctaagtgtgggttcaaatcccatatgctgcagataaaaacccatgctcaccgtatttttttagtttgccatattctgcatcatatacatgtaacatattaacaaaattattttattcaaattgaacaaatcgtcttttgggtttgattcttcttgcaatcacattttttatttttctttgcactaaatatgtttattttttattgtttttaacatattaacaaaattattttgttcaaatttaacaaattgtcttatgggtttgattcttgttgcaatcacatttttcatttttctttgcactaaatatgttttatttttttattgttttgggcaaactagcgtatgatgaatttaaaatcatacattgtgacagtcgtgataaaaatgtcacgagttagcgggctgtgaatatccactgggctcatctgtgacgaaaaacaaaatatcgtcacggtgtatgtttgtcagtgatgatatgtaaatccgtcaccgagaatccgtcacggattaacaagtttcttgtagttaggaaa

SEQ ID NO: 51263 - DNA, 778 bp, Oryza sativa
attaattagaagctaataatccaattttatttgaaattaaattaattttcaaagaaaatcctcgaagatttttgaaaaagaaaaaaactaactgcgtacaatcacggttgctagctagcaacgtagttccaggatgatagtatgcttatatagcaaaaaaaaaaaaaattgacgaaaatccagcaggagaggctcctactaaaatgcattggcaatagtagatatttacaatcccaaaaagttctgagagggagaaaagaagaaagaagaaaatagaacttataagaacaaattacagattatctagtcatgatttctagggtggtctgtctgagctttaaccctatgcaaaagtagggtaaaaactatatagcgaaaatcaagaaaatgccattaaatttgtgaaaaaaaccacaaagatttaaatttgagcaagagaagtgttggcctctggttttgaacaccgaaaatgtcatgtgtttagctgtattaatccctggatcagtaacacattcataaccaagcaatacatacaatgaaatgaatttaggctaaaagagcgtaatgcctttacaagtaccactagggtcttgccctatcacataacaatagtggaaaacaaaaatatatataatattattttggaccatattttaaccatttgcatcatatctacaaagaaaatgggcagcatagattataatatcatatatcactttgcaaacatgtataactaaattagctctgcaatgcctgaaaacagagtttgcaccttata

SEQ ID NO: 51264 - DNA, 4256 bp, Oryza sativa
ataagtaacatgctcatatgttgacgctttacatggcattcgagaattatgacaaatcatgaaattttatttaatgatatggattataaatttgattatcacgtaggatccagtctattcggcccatgtcagttcataattatacatgactgaattagatttacatgctcgcatcttggcactctacatggcatgggagaattataagaaatcatgaaattgttttttaaggttttaatgatatggattatatcatcatataaatatgcctaaaatatagtttccagtctattcgacgtatacgggaataacctaaaatatcaatcttatttaccaccatgtataagttatatgttttggcgattatattatgccctaaataataactaaaagaacagagagagtacacattatttttttcttctttgatttctaatgaatatgcatgatgtgtgggaactttatactaactttagttaattaggaaacacaaataatacaaaacttatatatgagaattcatgcaataaaaagaaactttataataagaattgccctaatacaagcatacgttagtctttgacacttaaacatttaaaaatactctacacatactaattaaaaatacactagcatataattgcgctcttatttcaagtagaattcatttcaatgaaaataagaaagcgtgtgaaaaaggacaagtaaacagaattttatctttaattagattaaacaattctatttgccattttttatagaaatatcctcaattaatatatctaaaatccataaatacatttataagagaaaaaaattgttacttaaagtatatgaacccaaaaacaagatatgctaaatattccaaaagtaatcacacatattacaaataagtttcattggaacaaactccatgttgcgacaatatcttctcatatacaacggtccaagtaattttagttgagaaatgtggcaaggataactatgagaatatataagaaacattcaaagcaatctcaaatacattattgacaaaaacaagtttagagttgaatcaaagccacacataaattaaagcgataacaaataaggtgcccgcgcatatgcgcgggctaccttcctacactggtggagaagtgctttttagtcccggttcataaccccccctttagtcccggttgtccaatccggactacgaatccgggactaaatatcgctatctttagtcccgggtgaaataaccggcactaaagatcaatctttagtcccggttgataacaccaaccgggactaaatatagggatcttaccaaccgggactaaagagggaataacagcagtacagatggtcctctttctttttttttcttttttattttctcctgaatcaagtggcatgcatattcccaaatcccaaatcaaagtaacatcccaaatccacatcacaaatctttaagttacttatacacataaatcaaatacatcgcaaatcctaaaaaaaattacacaaatcaaattacatcacaagttctacaaaattcatcgcaaatacgtcacaagttcacatcgtatacaaatcaaatacatcacaggatcatatgcaataaatcacgaattcttaaagaaaaaggaaccacagaggtgccgctcggccggccgctgccgcctcctctccgcgccagccggccaccgccgcgcggcgcgccgcccgccaccgcgcaggccgccgccacgtcggccgcgccgcccgccacccgaccggtccgctcgatctcgctcgatccaaaaagaagagaggaaggaagaaagagataaggcagaagttagagaggaagaaagaaagagatagagtttgttgtgtggacgagagaagaggataaataatagggattatatagtacgtgttgatttttattcccggttagtaacaccaaccaggactaaagttagatctttagtcccggttggtgttacaaaccaggactaaagatcctaggcgcctaatatagtctgacatggtaccaaccgggactaaaaatcatatttagtctcggttggtatgatttttagcacaaaccgggaataaagatcatctaggactaaaaaatcatttttagtcctgatttttaatggaaccgggactattatagatttgggttgaccgatcaaatatggtttctacaccagtgcaaattgatctaaacaggcccatagccacattcatatactctctctctccgtgtcttaatgcatgataatattgttaacatttgaacaaatgtttaatcatttgacttatttaaaaaatatatatattttttaaaaatatgataaagtaactaacaataaagtaaataataattatatttttagtgagatgtgttttacaaattaattaacagcgtcatctactttaaaagaacagaagagagggagaagaatatactagttcgttaatttctcgccatcacgagatgagcttaattaagctatagtacccgtaccagcatttgcatgcatcgtccaatgaatcagccgcttccaaaccaaatccaaagcgaaggtgccaagcaaagcgcacgcacgcacgtttcgttaaacaaggccagtggattaggacgcgagtgacggcagaagtgcgggcggtggggcccgcatgtcggcgtcatttgaccggaccgaaaggggccggagttttttcaacgcacgcgcgcccgcatgcatgttggtgcgaagtgcgtctcctactattaattcgtcacgtgccgtcgctgaccgtttaccaattaattaatgctgatcgatcagttaattactccttccgttccatgatataagagattttgagtttttccttgcactgtttgatcactcgtcttattcaaaaaattttgaaattattatttattttttatgacttactttattattcaaagtactttaagcacaacttttattttttatatttgcataaattttttaaataacacgagtggtcaaacaatacaaacaaaaactacggagagagtagtttggaggtacataggatcataggagtatgtcatcgcttcctcccgctgatgtatccggatcctctgcatactttgttcatactcctcttaacgggtcacttatcaatgctgcataataaaagagcatctccaacatactccctctgtttcatattacaagattttctagcattgccaatatttatatatatattaatgaatctagacacatatttattagcatatgtatgaatataaataatgctagaaagtgttataacgtttcagatataacagatataggctcccatcggttgccattttacccaaaatggcttatttggcttattagaaaattaaaattaatttataagtaaaacttttgtagatttgttcgtagcgacttaaaagctaacattaacaaaaattacgttaaaagcattttaaaatcaacttcaaaatcaagtttaaaaattcaaattttggcttattctttggctgtttaggccaaacgatggggactgatagtagttatcttcgccgtccctgcgccgcccctttgttgtggcctcgtccgctacagcagttgcttgttgtcccttcgttgtggcccctgtccactgcggcgatcaccgccgtacctccgctgcggctcctatccgctatttgccgtgcattcgactgcgacggtcgcccatgtattaaattctatttgcaaaacaatgttcttttaactgtttgatttaactaaatgaaagtgacagggaattatgactaacgctaaacaagtactccggtacgttgtcaacattgaactattatgacctagctttgccgaccaggccagctctcgaatcttgatcggcttttgttatatattaactgttaaatgctaaatcattcgaggatgtaacgaaccattctaaactagactgctgaagacggaatctagttcttgtacacggtacacctgaacttttatacgtacgcaacctcgttacgccatacactaccacataatagggattcggtgccggttttcctaaccggcactacaaagacggcacaaatcacaacagattaaaggtggtggtttcaaaatcgacaccttcaaggcgcacacaagccaagaaaaatcggcttgatgcattgagccgatgcatcaagccatcaaactgatcccaaataatactcaatcccaaaattttgcatcaaatccatgaacacatctagatcacattcaaca

SEQ ID NO: 51265 - DNA, 3658 bp, Oryza sativa
acaaacacaaggagggaaggacaagaagggaggggaagaaatcgatccgtgggcctccagccacctgccgccgccgcatcccccttccttccgccacctccctccctcccccccagttggcccgcccctccatgggatctggcagagggaggagaggggaggtcgtggccgccgcctccgccgaccagacgcccgccgtggcggaggggagggcgtggccgccgctgctgcctccgccggccagccaccgggcgagagagaagggagggagagagagggaagggatggatagaagacgctcacgtgagtggatggatcgaagtcatcgaaccttatctcctcgttctggtggggcccgtcgactcatcgatttgccggctcggctcaattcgtaggtgtcggttttttataaaaattcagcatattataggtgtcagcttttaattaatcgacacttctaatatattaaaggtgccggtcttttttaagaaaaccgacacctgtagaatagatgtcgatacttatttagaactggcacctataattgcttaaaggtgcctttttttggatttcaacccgcggaagttggaaaatggttataggtgatggttttagcacttccggcacctatagtgccgagatctatttgatgttttgtagtagtgatagctaatttagccaaaaaaatttccaaaagtaagacacgcatgctggtgtagaggaaagtattattggtaattaaacccagaaaaaaatgcaaataatctaattactagataatattataagtaacatatatagacaactagaaatgcatatcgtcttgactcctgtgatgctgtgcagtttgggcaggtgtattaggtgcccccaattacagggccataaacatctctgttgatcctcaaattctatcatttgattgtattttgtctaatctctttctatatacttataatatggtagagacttaagaatacccatggccgacagagaacgatgttggttacaagaactaaaggtgaaaatggtgtcggtaattcctgacctaacggtttttatattttacccatttttttaggaacggaacaaaaacagaaacggaaatgataagaaaaaaatgaaaatagaaaccaaaatgatctcgctattctacaaactgttacattgttttatgatattttcttggaatttatcattttattactccaacacgtggtcctcgtctttagtcggcccatatatcatagtagagactcatcaattgtattactccctccatcccataatataaggcatggtcaaacttgacacagtcttcaaaactaatctttgacttataatttctcatatattataaggtttattgcaacaaaattataacatgataaagtaaatttaaatgtcaatctaatgatattaattttagcaaataaaatttaatttatattataataattattggtcaaatatttttaaagctgaatcttgaaatatgtgtacgccttatattatgggatagagggagtactaaactttgagcacgtaggaaaacataggcatatctcggatgaccactcaaaattaatgtagccaaagctcatgtatataaataaaaagaaaaaaaatgtaggggggagaacaattatttttcttttgcacgagtgacatttagcaattcgcttattaaacttttgatcaattatatatttctgttgtatgttatattatgtttacagtattttaaaaaatatgtaagtggaccacccatatctaaatttctagacatgttaccgtagttaaagggaagccaatttagataatgcaagtatgaattaatgtggtcatattatatagtcatgtaaagctatatctgtgattttatacttcagaatttatgacatgagtatatgcttttatctatgcctgtctgaaaagttatgttttacgaaaattgcaaaaaccacatttagttcaaatttggcatttcattccatgtcattatgttacaaatgctcatcctcctacttaattttgttgcaaaggaacaccccattacgcacgtgtttagttgaatccaccgtagactaagctagttgagctaatcttgtccaagtgcttgattagacttacttttcatctttcattatttttttatgcatataacggaactcaatgagataacgttttagctctcattagtaattttatttatggaatatccaagaaaagtgtcaaggctatactccgtatttaattttggaagagaccacattaacggctcacaattaaaaaaaacatgttgattcggttaagccgtgcgcacgggggtacgtggtttctactttctacacaaaattgagtagggttgagtatttacaacaaaataacttatatgctaaaatgtcaaacttcaaatgacttataggatggtttttcaaattttcgaaatgttttttccttagtttctagatattgttttctgtttccggctctactctttccaatttcagaggggaaaaaatatgctaatggaattggtggaccgtttgttcaaataccgattttatattcctgatccgaactgttgttcgaagtgggtgtgcgaggggaaacataatgtgcaattaagcacgtggaaagtgtgtgcgatggttggacaagtactgacacatatggatgcattcgcctttttgggggaattgggatttctggtgtagtgttgtaggcgtagattgtacactctacgtgggaagtaacgtcgtatacgtaccagccggggtacgcacatcggggcctctcacctcacatgtgcatgggccggcccagccggactcccgcgagcatgggcctaatgctgatggactctaccagtttgccactagcccactactccatctactactattcacgtatggaaaaagtccactctgactcccttaaaagtcggccgaatctaattcgtgccctttaaccacaaaaccgaatagaacgactctctgaaatattgaaaccggtgtaatttgactctcttaatggttttcgagggtggtttcgcgcagacgtggcgcttacgtgacggtgttgacttgtcttcgtcccacgtggcgttaacattgcgcttatgtaatattagaattaaaaatagatatgtgggactcatttgtcatttacacacaataaatacaatggacccactgactgtggggcccacatggtcatcttatctccaacccttcttctttctccctctctccccccttatttctctctctctctctctctcttcccgtcggccgtctgcaaggaatgggattggagcggcggtggcgggcggtggagcagcggacgggagccggagtggtggcgtcgggagggagggtgggtagcgtttggggtggtgctggcgcggatggaggcgaaaggggaggcggcagcggcagggaagacggctgtgatggtagcggcggcgggcaggagggtggacgagagaggatggggcggcgaccatccatgcaacggagacggctcgatgacgaccccgcgacgaccggggacgcccccgcgatagaaacaactcggcaatgaccttgcgacgctaacgggcggagggagagcggtggcggcgtggcactctagatccggcctccacgtgccg

SEQ ID NO: 51266 - DNA, 629 bp, Oryza sativa
caatttaggcagctgtgtaagttgataaatatatttcatgacattccatccttgtagtactaaacattataattaatggataagattagaaagtaatgcggtggttcgatttaataacctaaacacttgtgtatattgtctcacaaatttccattctatttctaacaagccttatgacatatattttctcttgttcatagagggccaccaaagaacagaacgaagaaaactaatgaagcaacctcagagactagtatcatggctgctccaatagttacaccaataatggcataccctcctaggttagcctatcttctttatttcattctacattggatttagatcaattagttacataacaatttatttttcacagtcaaaactttaatttcaccgaggacaataggacattgaacaatagctcaggttcaagtatatcaattaggtaagtaattagatcaattatgtcaatttgctggtattatgttgttctatgcaatatattcacaattctctttttcagatcaagatcacttactggctccaaccaacctgagccatctaacatgattgtagccttgccatgtctgggggaggaaacacctacagttgcaccaaaaatgaccaag

SEQ ID NO: 51267 - DNA, 771 bp, Oryza sativa
attcctgcagccctgtataaaccaaaatgaatgttctttttatctatactaattcgagtgtaccatttagtcaaaatgttatcactatagtaatctctggttgccgttgtattcaccatattgtagtatcgaaattcttagtggtctcgaggggcatcatatttgtgtaatgtgaactcttcccaagacaatggaaacggtatttgttgattccagttcgcactctggtaggtgttcacactaactcgatcaaatgaaatgtacgcattagtactacaacaaactattattagcttttcaatctctggatgttgctagggctgtatcctagacaggttctgactaaaccattcaggttttagcccttggcatcttccaagccatttgctttcacatattcagaattgactgacattcatttattgttacaactaatttcggtgatcagctttcctggaaaatatttgctgaaaatatatgtatcagtaccaaaatgtcacatcttaattgctgaaaacatatgtacataaccaaatatatgtaacagaattgcatattttcagatattcacatatctactttattctgtcaatagctgaaaatatgggaaacatcgccaaaatctaattgagttgtcaccagcacatacattatccgtgtcaattagcaataccattcaatttaaagatttgtacagtacttgattaatgaaatcttgaagttacttgctcatatgaagtcactaaagttctgctattttgaactctttga

SEQ ID NO: 51268 - DNA, 1298 bp, Oryza sativa
ctaagcttggacaagttcacaagagctctcagattgcgatggttgtggaatgaatggagagatcctgagcaagccttgggtgggattggaaacgccttgtgatggtgtggatagggacctcttcgccgcctcaacaaagataacggtgggcaatgggaatacgacgcgcttctgggactccgcatggattgacggccaaagaccaaaagacctaatgccgttggtctatgagatctccaaaaataggaagaaatccctacgccaaaggaaagaagacgactcctaggtgcatgacctgaccctcgatgcggattcatctatcacaatcaaccttctcaatcagctagtctgcctgtgggaggcggtatggaatgtgcacttagacagcgaagagccggatcagattgtttggaaattcacaagcagcggccactatacagcttcctcggcttatcatgcccaatgtttgggggcgccaaacacaaacttcaactccctaatctggaaagtttgggcgtcggggaaatgtaaatttcatgcctggctcatcattcaaaatagagtctggacgtcggaccgactcgcgacaaggggttggcggaataacggacattgccccctatgtcgttgtgacgccgagacggccttgcacctcgtcgccatgtgtagatacacgaagagaatctagcaccttattgctacatgggcgggatatcagcagttggaaccggcccaatgggaggaagcccggtcagtccatcagtggtgggagagcctagctaatacacccggcattccaaaaaagggccttcggtcccttattcttctagtagtttgggaaatttggaaggagtgaaatcggcgaatctttgatcacaaagagatggcaacaggtgttctcctagcaaaaatcaaagaggaggccagcttgtggactttagatggggctaaaagattgcgcgaactcatcccgcactctgtatagtgtatagtctaaagatctttttgttttacccctaggggttgtattttctccttctattcaatgaaaaagcattgctgtgctgttttttccgttaaaaaaaaatctcttttcagggtttgctgagaatgtttacatagttgtaaatcttgtttggagtactacttctgtttacttttgtaaggtttgatcatagcattttgcttccgtttttatttttctgatgcagctccatcatacatcgattgcattattgaagtgtgatgaaaattatagttatcatgtggagaattttctatcatatatctttgaatga

SEQ ID NO: 51269 - DNA, 713 bp, Oryza sativa
acaacatctgtcatctttccaggcttgagggaaaaacatggaaagaattgcggtggggacattacagctcatccaaagttctcatcggagagttcgcttgattacagtaagtcggtaactgctaagaaaagatcaaaccgcatgtcaaaacaatcgaaaacaggatagagtttcttttattcccccttaaagtagcaattataaaaatctaccaagtatagtttctactgttcagcaaacaattaactaactcgattcatagcttgcattctgatatattcgctttgttcttgatccaaatctccaattgcaggaaaaggtgaaatgcgcttatggtaggaagtctctagctgtgtggaccaagcctaatattccaacccaccccaactctgattatctgatataatctgcctttctgtactatgcatttctttatgaactttctgtgcaaatgagaataacagttaagaatcaagtagaccacctgacctgacctgattatctgataacagtaagaatcaagtagaccacccacctagcatttctttatagatttggtcacatactctaatgtttgcttgcaaaatggcaaaaaaataaaaataaaaggtgtacacatatacatcatgtagtgctgcaatttgagacaactgacatgaatacagacttggatcaaatctgtgacgaaattgcagcactcaggatgctcttaa

SEQ ID NO: 51270 - DNA, 748 bp, Oryza sativa
tcctgcagcccttgtatacatgtacactctttatcaatttttgaaatgatttttctcctaacctatctatctgatctatgatctaattatatcgttatattcgttgtaattaaatttttataacaagatctcacatgagtatattacgttgagaaaaacatatgaaacatttttatactataaatgaaacaattgagttataagtactgaaacatcaaaagaacactattgcaatatttgcaaataaactagtgaaacatttgaaaaaacttattgaaacacctagattccggatttgcaacattcaataatccgtagcaacacaaaactttaaatgtgcaacaaagtcgaattaaaaattaagacatttatttctcacgcgtgaaacattcgattttaacggttgaaacatgtaaaaagataatgtacaacattgtacatgcactagtgaaacatcaataaatacttgttggaacattacattatcaatgcccaacatttaaaaagtaaaaaaaaagtcgtcgacatattgtcgtgtgatatcttgttacaaatatttaattgtaacgaatccaacaatataattagtttgaaattcggataaatagtttaatagaaaaaatcatttaaattttgaaacatactcgcatgtactctctcttagctaactggctatacacatgcgctaattgctcccttagatattttacgtacgattttttctttccggccgaattgaacggcgatg

SEQ ID NO: 51271 - DNA, 725 bp, Oryza sativa
tgcaatctctttgcttgagccgtaaggatgatggaacaattgatttcctttactctccgtacattttgatgttgtctaggccaatggttcagcgataagcaagcgaatcaatcgactaattaagtaattagctacactgatccatgcatacctggtgccaattggaaacctagcaaataaagttgtgtacttgtagaatctttccaataaataattatgtaagaataaccgtctgcagagccggagggcacgctgacatttgacggaccatgggtgcttttgaagtgttaggctaactagctctttggagtaaagatcaaccggtgcaagaaaaaggacaggttaattatgtttttgttgaataaagttgtttgcttttagtatggcatattgcaaatactattatgatagcattggctgctataaattaaagaagagtgtttttttttaggaaaaggacccatccaaagttaaaagatagttctcacctttcatcaccatctcaagtttttctgtgaactacttattccaggaaaaaaatatttgtgaactgttcaattaattgagttgatctgctacccaacacattgttagatagaattgtttctaatgttatactgttcaatacaagcatcaaagtagctagggagagttaaaacatttcacatataattactttgaattaattcaattcatcttgtatccccattaagattttttacatg

SEQ ID NO: 51272 - DNA, 642 bp, Oryza sativa
tgaggatgcatctgaggatgatggtgtcaatgaatccgaggatgagtcaatggcatcagatgggatgcctgacatattcctattgcaacttatgacaaaaatgacccaccaatgatcgtaggcagcgtatatccaaacattaatgaatttagattggcaatagcacaacatgcaataaaaaaggagtttgaatataacatcatccgaagtgaaccagggcaatttactgcaagttgtgctgctaaaggctgcaaatggaggattcatgcatccgtggttgctgatggtgtcactatgatggtatgtttttaatttaaatcagcatgcattctttaagtatattgtcatatgcatggagcccatacttctatgagaaacatatggcagccatacaagaagttaaaccagaagcagtagcataccttaagaagtatcacaaaaggctatggagtaggagtcagttctgtacaatttgcaaggttgattatgtgacaaataaccttgcagaaagcttcaacaacttggtgaaagattggaaagcactacatttatatgacttcttggagaggattcggcggtggttgttggtgaaatgggataagaggcaaagaataggaaagaaattcgaaggctgcattctac

SEQ ID NO: 51273 - DNA, 727 bp, Oryza sativa
tgcagcccgtacaaagctggcacgcattgcgcagcttggcccgaacaccggccagcttgcaaacacaactccggttatcatgaagggctgcgagcctgcgactgcgagcctttttccttggtgattgatttgtaaattacaatcgtttggaatctggtatgtgatcacaaaggaaatggttgcaagaggaaatatatttatggttcaacttcatggaaaccgaaggaaatggttgtttcatattggtatatgcttactctttggctagttaatgatttgtagtaatatatatggcgacaatgagaggaaaaaaaattgtaacagtgcatgtgatggacagatattgattagaagcagaggtgcgtactgatgacaacggttggtacaatttgtactgaccaaaagaagatgatatagtactagttaaattgcatgcaccaaggtcgtacagtactcaccgatcaagctgggtttcctccatgaacacgacgccgagaagtttgattttcaactaattagtgatcagtaagacagtaacctaaccaactaatgatcccaacaactatggcggtctaaccatgtataaggaattggttaactcgggaaaaaaggttttctttgggaaaaccccaaatttttttttccaaccgaaaccttgctagtaacaattagtagtaccagttgcttttccttttcgcagtgaatattcctgtcttacctactgatc

SEQ ID NO: 51274 - DNA, 1642 bp, Oryza sativa
ggtcacctatatttatgggtggaaatgggagagtggaaaaaatgaaaatgggatggtgactcattttttttatgatcctcctgcttgcacttttattccagagaacatcactatactttttttttcatcatgcttgagaaaatttgcttcattctcttttgagcagagttttttttagctcatgtctcatttggcatggatcattagaggagagaccatacaatgtttttagtctttatttggtggatgccgacttctggtgtaaagtttagcatatgaaagtgaatggaatgtgttgctaatcctacagtgcggagaaaaagcaaaatttttggtggctaagtgcacaagactttggtcatgagaatatgaaaataatctaacaagggtcacaaccatttagcaaaactcaaaatgatagcaagcagcatatgtataaggtttcgtcattaagattgacatatggctttggtaggaaaggaacaacattgaggagtatgcaaagttattttattttcctttataaattccaagggttcaacatcaagtgcaagtttcatatcattaggccatctctcattaatcaataacttagataacacgtggtcccatgagtatgtaagtcatagaaggtgtgtgcagggaatagaaggtatgcaagtcatttttacaagcaattcggagactctagttgatcatgtcaatactcattttaattgttgagttaattttagataaggcaaaattaatccaactcaagcaattaaggatatgaaggataaacgtgcaaaccaacgctcatatgtgagtgtgaagacgtgcagctctgtgcaatgggtgcttcgtctcatcttgtgaatgtgcaagcgtccgggtgtagcacagacatgggtatcttgtatgtgaatgcgtcatgtgagcacaagatcaccccacacttgttttcgtacctagggtgcttcaaaagacaaaaagacaaaagaaaaatgtaaaagcaaaatggaactcactcagtgaaacccgatgagtcttttattttggcatttcatccaggaggcaaaggcggccttgcagcaagctccagttgcccaaatccagaagatcggaaggcatagtaattttgtaacgcatggtcttgctctactcagcctatgcctgaaacaaagtgttgtttggctctcaggctcccaagtgtgtttctgaacgcctgtcctgagattgtaatccagtcgtcgtttaattaatatatttctttcccccgagaaaaacataaggagtaagaaaatgtttatgaaatacttactgtttggtacagctactgagagacacttatggaatgctttagaaaagtgaaatcacatatattggaagaagaaagataattttgtataaaggtactctggagatatgtaaggctaaatttgtgaataatgtttgtcttgagacccccaacatgtacatgtgtatggcgagcacaatatctccaacacagagaaactgctagagcagtacaccatatacatatatacccatctgtaatagacataatcaataagcttgattttttttcctttaaaacttcaagacgtttgatatactatatgactttttcttccatgtagttctacctctcacaatctcc

SEQ ID NO: 51275 - DNA, 526 bp, Oryza sativa
ggccccacctgtcggcgagagtagacgggcgggcccgcctgtcggcggctgcgcgggagggggaagggggaggccgagtgggccgcgggggaaggagagagagggggaggggaatgggccgaattcagcccagagagaggggaagggattttagggttttctttttagaaaaactattaaactttgtttatttcttgataattattatttgtgctctgaaaattccactaaaatttgattacgcattttaggctttgagaaaataaacaaaaattctccaagcctcatttgacttttaggtttacacattttattgttgaagactttaacaagaatttttcttattttaggaataatttaaggaatgcattttagggtcgttttgggacgtgacagcagcgacggagtgctggcagcacccgtggagccaggcaggcactgaggtgtggggcaacgcttgacatggtagctgttgacggtcgttatcgaccaatttcgaccgtcaatattaccgggctgcaggaat

SEQ ID NO: 51276 - DNA, 1061 bp, Oryza sativa
tctagcggagggccattctcggggtataacgttttactactattgttcgttcttcgtttcctgctagtgacagccacaatgtcattgcgttgtcttgtttatgttgacgcttattttatattaagcatactcatgttgtatacatttagcactgtcactagatccacttatattgcaaagtcatgtttattgtcttaatattttggattaaaatatgccaaattatgaccaaatttccaacagcgtcaaggggtgtttgcatgaccctaaacttcatatattagtagctgccaccacttttagggtttgggttttgcttagattaatctgtcagaacagattcgtcgatccttcggtttgtgagagccccaacttgtgagtttaatcattcatatataatttggttgtattcgtttttgttcttgtttgtgttcttcgattcgcaagcagggattagccttctcggtgaggtcaaccgggtttcgacacggttgataaccaaaggagacgtggtgctgcgattgcggggcttaagagcgtgtttgtttagaagttggatcgacttgtgtcgcgactccaccaaatcgactgtttatcagaacctttcggaagatcgggaacccttgtccacatcaataacaccaacccggactaaaaaatcgatctttagttctggttggtaacaccaacccgaactaaagatgcctctaagattagttcataaggaaagcatctatattctagtcagatgtgtgtagtaggtgtgatggttacacgcgtgagtgctaaggtgaaagatcataattatcctttcttactacataaacacactgttgtgttcggcatttgagcaagaacaatagtaggctacaagtctgctataagcatgtgtggaatagataagagaggatagagaaggaaatcaactataagcatgtgtggaagagataagagaggatagagaaggaaagcggagcaggtacaatagtaggctacaagtcagctataaacatgtgtggatgagataaaagaggatagagaaggaaaggggctgcagggat

SEQ ID NO: 51277 - DNA, 687 bp, Oryza sativa
aatgggagataaaccagcaattgaaaaaaatggttgggggacaatcagacaaagaatgaataattggaaaacaaattgatttcaagacattgatagtaatcatcaactttttaccactctggaggggtgagcggcaatagatttgccactttgtgggactggtggctgagagagggattaaacttaaactgttctagtaaaaaaggcaaaactagaacggattgggaagtgtcatacaaggataacaagtcacagattaatcattgtctgtggtggtagtagatgaggagttgtgatagacaaagctgatccattggacatttgaatcgccaccgagatgcacgaatgaggagcgccatgcctctaccccgatatgcgtgattgggtatcctcctgtgcacatcgagcccattgagtggcaccccgggggcatggggatggaagaagtaggaaaataatgagaagacggggcaataccatggccctgtcgctttgttgagaaatgctaatatgataattgatagagaaagacatttcaatcgaatggataatataatcttgatgatctggtctcatagaagttgagttttatagcagtaggtgtgtttgagaggagggaaaagaagaagattgagaagataaaaaaaaactaggtcagccgttagcgcataattaattgagtattaa

SEQ ID NO: 51278 - DNA, 1055 bp, Oryza sativa
cctcccggggccgaacctgatacggtgaagtcgtcccccttcggcatatgctcttcgccttgcgtccttcgcccaggaggcctctagcttggctgcgattccctgcctctcgccatccttgctccatagtcttcgccatgggggggttcgccttgactaaccctgacgtctcgggctttaatccccattggtcgcatgctttcggcaggtttggtcgaagggtctcatgccatatcgccaacatttggttctttgcaagttttggtactaccaacaatttggtataatatcacattgatttagctataaattggcttcaatccaaacaatatcaaagcactattaaagttgccaaatgaattcgtagggcacattttggtagcaaaccaaaatggccgctagatttcaaaaaatattttattaccggaccatctattagaattattatcatctcagtcaccatcttttttcatgaaaacaaacattgagctatgtattagatattagtcagaacagctaactgtatgcccaactacttacaaattagttattcttgtttagtaaaattactccacctataatcgaagggtcatttcatataatgcttgtcaattgatgaatcatgagcatagtattagaatatttcctgcctaccatgcttcaatgctacaaaactttgaaatgccattacgtgattcttagattttgtatctcctcactcttacggtcttcgtgcaacaggagtcatataggtagtgttggaacttagaaacactggaaactgaaatggattaagcaaaatgccgactttgtctggctgaatcaaggaatggaatggaaaccctttccatcgtttggttcgaataagtgatcatccatgcaatgaacatataaacaagcaattcaccacataaatacgaaaggcaagacaacaattcagacaaaaaatcacaagaactagatctgatgtgtacgttggcactcggcagattactgatttccaaggtgggacataccagatttctatcacgctgttatttgttaccatgtatttg

SEQ ID NO: 51279 - DNA, 780 bp, Oryza sativa
ttcctgcagcccacatatgagatacaaaatacgcaggtttactaactggaaagtttgatagcatcaataaagagtgtggaaacagatcgcagagagcattaatcccagttcagtgtacatattaactataaaaaatatgtagtttataataatataattcaagtatattgatgttgtcacggtgctctggcaaggcaccgtaagcccacagagccagggtggcatccaggtcaggccatagcaatgctacggaaataaaatataaaaaggaaaggagtagcgcaacacataaacagataaactcagctccctccctctagctctcatcctagatgaggaccccaggcaagtgccacccatcaccaggacggcatatgacacagcaacaatgtgacaacattggcatattgtctttcagattcatcgctctcagtagaaaatattatatggtaagaatcagtcacctagcatattccatacatttcctccatattatattacaacaggaagtggtttcataataagtttatgaagcaaaacaactgaaaaatagttcctacacaataaactttccaagaatatgtacactccaaagagaaattaatgtcattctttacaacaagaatcatgcatcatggagtagaatcacatcaatttattaaaacactattaagagctgcatgaatttcttaccagtgcatcagaattttgatcccttgtgccctttccaatagcatcagctaatcttgtcgtcaactgataaacaaataaaaaaccatt

SEQ ID NO: 51280 - DNA, 818 bp, Oryza sativa
aattcctgcagccctcatttgtaacttgttgatagcaccctgtcaatatccagatttatataaggtagggtttaaagtttgaagaactgaaagtttcaattgatctctagaagggacaagtagtcctattgtcctgtagccatcagtccatcaaccatcacttagtaaaattgtaagcatactgtgacaccatcattgcttaattgttttgggggtatacattgttctattgtgcagtgtaagtctaacataataaaactatttaattgacaggttatggacaagtatctcaagaggaaagcgcccgatagttccaataatgtagctgtacgaaattcttgttcagaacaagatgacaatagttgggtgatgactacttaagtcatagtcttatttgctatgtggagaaagaagaaatgagaagagtaaccaacaaagctgtagttgaccgttttatgaacatgagaacacgagtatactaaaaggtaacacatttatttttatatttttacatgttcattggatataaatttttagttgaaattaatatgtttctaacttctgttctgcttttattgtaggctattacctatcgatgatattgagattgacagctttgaggccgaggatgtattttgcataaattgatcgtcttttatgtattttttgatgttcccctttgcggtttcttttcatcttatatttcggtaagcacttttacttgctactcaatgattttttgtgtcaatagttatctacaaatgaacaaataccattctttacagtaattgctgccatctatatagtaaagtagggca

SEQ ID NO: 51281 - DNA, 1187 bp, Oryza sativa
gtggtgtttggttggagggactaaagtggggctaaactttagtccctctcacaaaaacataagtccctaccatagggacttaatacttttgtgagagggactaaatttagtccctagttcccaaacaccccctaaaactaaagagtacatgttatttctattttcaaatgcatatactatttaacacaaaatcctactaaaattcacgattaatacaatctacttagtcaacaatcagttcattgtaaccacctacacgtgcatttgcacgggctgttattattatgttgtaaacataaaaattctagctatgtatcaaatatattgattgttgtttgaaacagagcagcaaagaataaaaagaaatctagaaaaataataagttgagtcgaagatgtgaacaactaatatttacatgaatgacactctcagccaatgcggaattgcagatgttacatgggggtacggttttcaagacaatcaaaccaactcccactctcatccaatgcggatgttatatctgtcaaaacctctccatgacaagcagacccaactactatctcggattctcggatcccatgtgggagccacatggatcaaaacaactatcaacaggtgaagagacgaggtttacctaattttgaaagttcggacatgggttttacccagtttggagttgagggacaaaaattaaaccatgcaaagtgtagagtgattggagatgttaatcatcaaattgttgcttcggcgggaagcttcaacatgccagtagtggtggctggtgaggtatagctctacagaacaacaagagggcttcgggctaacgtggtccctatggcagtacaagacaattaaggtaggcttcaatgacagttgatgagtgctgccggcttattggattaatgtgatggattagagctcccgttgatgcttcgagctcaggtgactgattttgatcgcctgacccaccatacaaataaggtcctggaggagattcagagattcatgtctgcccagaacatgagctaggggtggatctaacatgggacattggggttcagttgaacccccaaactttttgggagcaaacagactgttcttagaattaaggttaatgcaaatttctagaagagaagctatggtaacacaaattcgagaaagcgtgggtaaagagggatgagaaagag

SEQ ID NO: 51282 - DNA, 1116 bp, Oryza sativa
ttatattacaattaggagcaatggagagcacaaagagatatttagagagggacttagaggcgtggaggaccagcaagggcgtccaagtcaagatggaggtccaaatctagttgacttcgagtacgtttcaaagtccatgaccaatctgtactaaaacgggcgcccaggtcacatacgtgctcggattggggtgttctttatatggatggaaagctaagaagataacatttccaatggttccaatcccatatccaaattctttccgagtcatcgggaatcgaccgaacaagttgacttccaaattttgttccggtgctgtgtcaccgtattttggcctttgggccgtgtatcgtgttggagcccattagggttgcgtatgttagattaatgggctagacccaattaaatcctaataaattccattggtccacattaagtgctatgggtaataataccaccttggaaatctaagtgaagaggtctcaacttaaatatggagctagtggagagtctctgttgaccggttgagatggtgggcgaacagcaacacgcgcgcgccgggccgtggcgtgggcgtgggtgagacaaggctgctttctctctcgttttgtgtcacgtcccaaaacgactctaaaatacatcctctaaattatgcctagaataattaaaatccgtgtgaaagcctccaacaattaaaaggtgcaaagttaaaagtcaaataaggcttgggggatttttgtatatttcctaaaatgcgtaaataaattttagtggaattttcagagcacaaataataattattaagaaataaacaaagttaaaatgattttgtaaaaggaaaaactctaaaaagtcccatttccctccctctccctcttgggccggctcggcccatctccctccccctctctcctcttccccgcggcccatccggcctctccccgcgcgcgccgctaacgggcgggcccgcccgccaccctcgctgacgggtggggcccacccgtcatccccttcctcccgccgctcccgcaaccaccccgcagccctagcgctgccgtcgccgcggattccgccgcatcccgccgtccccgcgtgcaataaagtgggaagaatcac

SEQ ID NO: 51283 - DNA, 588 bp, Oryza sativa
  unsure (1)..(588): unsure at all n locations
attcctgcagccctgaaacagcatggctacatcactattgacgtggtatcaaatccccttcgttttggactgcaagaacgactggtcgtatagatcgtaaagcgtgaaactttttcagaagcaaagcttgtgatttgttagattgctactcgttaatcttggagatgcttacaaagcactagtatcttttagtacaaggtggcatggggccattgcaaaccacagatccatgcaaccctaatgagtactgactttttttttttgagggaaatgagtactgacttttaagtctgtgactaccactactggaaaattgatctttgctcggtcgccccaaaatcacaataatcccggtttaaaaccccatagccattctacgatcttctttagtcccggtttgtaataccaaccgggactaaagatgatcttggttcatcccctgtcagtccttgtcagaggggtggggatctttagtcccggntggtgtcacaaaccgggactaaagatcacgattggtattactaaccgggactaaaatcatgcatagtatataatccctattccctatcctatcctccacaaccggcc

SEQ ID NO: 51284 - DNA, 2939 bp, Oryza sativa
taaagatagcgatctttagtcccggattcgtagtcccggttagataaccgggactaaaagggggttatgaaccgggagtacagagggtttctccaaaagtgtacaaatgtaatctacttatgttgttttcttatgtgacaagtttaatcaaccctaatgtgaatacagaggtataacatgacaaaaagtattttgtgcaaaacaacttgtatagttttcttatgtgacaggtttaaacatgtaacgtgatgttgaatgttacatgaagatattatgattttactccacacttgctagctactccctccatccaaaatgtaacttttgtaggaattcaaccaatcacaatcattcttatttaattcatcgacatacttttttttctcaactaatcaaaatatttcatcattcaatctcacatacttaattactttatgtaaaaacctctcgaaatgctttaaaaaattggaacaaaggtagtagttagtccctctacgaaaaggaaaaaaaatcttctaactacaatcgaacacatgagttaaacccgtaggttgattttttttttcccaggagcacacgctgcagtactcctaagtggcaaggatttttatttttcaagaaactttacatgagtgatgtgatgaatcatagtttttgcaatgtctccaataatgtttacttttcagttgtgcactgcacagattacactgtgttcattctgtcagacaaacgatgaaacaaacctgtagtaggtctgtacgatcagtcccaatagaaactcgacacgctcgttctctccttttcctttccagaggacgtcgacatgttcagtggatagaacaccgaactctgccacaacgtatactatccaccagtttgcaactgtaggacaagactacaggaaaaaatggtgaataatcacaagaacacccgatgctagacaaacacatattccgctcgaagtatatgttgtcttggatatgtttgaagaaaactttataagctttaaccatttttctgaatatttagattggatgtatgtttaaagcttacaatttatctaacttgagaagtacttttacaatatatagttttgtggggggtttgcaaatattttacaatagaaattactagtcagagttgcatcttggaaccctgatggaagtagatgatggtggccttagaaaagatatacttttaggccccaaaaattccatatggaatttagaaaaacagtttaatatatgtagaaagatagaaaatttccctattcctaaggccttattggttgtctggaacacataaatctattaacttattaaaggaatagaaaaagaaacctccacgttcgctctcacggcctagaaattctcatattaatcagagaaaaagaaaaacagagtccatatagaaatacaatttagaaatagctgaaattcgaaattaaaaataaggaatattggaagaggagactagagtccatatagaaatacaattaagaaataatagaaattcggaattaaaaataaggaatattagaagtagagtatagagtccatatagaaatttaaaactaactaaaattcggaataaacataataatattaaaagtagagtttagagttcgtataaaaatacaatttacaaataactaaaatttgaaattaaaaaaaagcatgggaagaagagtctaaagtcaatataggaatacaatttagaagtaattgaaattcaaaattaaaaattaaagaatattgaaagatgagtttagagtccacatagaaatacaattagaaataattaaaattcagaattaaaaataaataatattggaagaagagccttgagtctatatagaaatacaatttacagataacgaaaatacggaattaaagaaaaagaaatattgaaagactagtctagagtccatataggaatataatttacaaataactaaaatttgatattaaaaataattaataactaacacgtatataaatacaatatgaatattgcacattagtagtttcgtaaagttagtacaaaatttaaaattatgttgtcattttgatatatttgaataatacattgagaaaacatatattctattatatgagagaaaatataatgatgctagccgcgcaatctgcgtaggtcaccatgctagtttatatttaaaataaatttcagaaaactacaaaatttagcacctactttattacaaagctacatatttgagacggagcaccacaaaactacagattttataatcatttaccacaaaattatagattttgtgccaatttagtcacagaactacaatatttagaactccagcaaaacaatgatactaactactaaggacttaaagtctaaaatatgcagttatgtgatactccacataaaaactataattttatgataaaattgatgttaaaacgttagttttgtgatacattaccttaaatctattaaatctatagtgttgtgataatttgacctaagtatatgtagttttacgatatttactcttgtatttaaatcaccttgagaaaaaaaagaaaaataggtttgaattggaaaatttgccggtttctcattatttcaaaatctgtttggtcaagaccaccccaggacccaggaaatattgatatgctagtggactggtcatcatctctctctgtggaaagctctgttgtagctctactgtttatattcgaggatagggacggaggataatggaggatgtgattccattcttaaggttggcatgcctacaactcactgatccaagaaaaaaatctatgtcattagccatggtccgtggaatcgtggatacctttagttccggacacagcgctagctcctactagatctctgtcttcgctttggaatcaggcacacttgtgtctgcccatctgaaagcctgctagaaatgt

SEQ ID NO: 51285 - DNA, 1061 bp, Oryza sativa
tgtaaaactatatttatacatgtaagtatatttaacaatgaatcaaatgatagaaaaagaattaataattacttaaattttttaaacaagacgaacgatcaaacatatttaaaaaaaagtcaacggcgtcgataacaaaatcggtagtgatgattcaacttaaggcggcaagtactgtaccttttcatttctttcacgttacgactagtagccatcaaaccaatacgtttggaaaatatatagtgaaaatccatgtattactacataaccattattactgcataattactagaggtaagtataggtataaaatacatttacaccaaatcttaagtttatactcagcttcatttgatagggaaaaaaagataaattttaggtgaatagtgtcctactactattgatctgatctttttttaactccctaataaaattgagttcgaacttgagattggtgagaatatatttcatgcctacacctatccctagttattttttgcatgaatttataaaacttttaggtccaattttaatgggttttcatttatttgatggttttcaccggatatgctccgatgtaggtatttgtgcgcaaattatttagatcagtgaattcttgtaccctagattgggttcaaaccctagatgaattcttgtaccagtgtgttggtgatatgtcctagagacaattaaagagatgattatatcacatactatgtttatatatttatcatacgttgtttcttgaaatagataactcattattgattaataaatatgtgagtccttcaagagacttttatgttgtatgttgttatttataaatgatccctgatgaaatatcatatgtgtaacaaatatggtttaatgattagtacatatattgattgatgatcatgcctcatagatcgtggtattaataatgtagacatatgttggggagcatgttgctggataaactcaatatgaggcacatcaagaactatatgtgatgtgccatcagtgatctcatttagtgttagttagaaacatcagaccgagattatcatagttcccaacat

SEQ ID NO: 51286 - DNA, 839 bp, Oryza sativa
ggtccaaggttagtgatggccattccactccaaggatcgccgagacgtctagcaaggggaaggacgtggtggtgactcccgacccggtctccaagaataagttgataggttcgccgggataacccgggaatctaggggcaacgacgagggtggcggcgtctgcgctaaggcctcaaaggcaccaggagtggtagcgaagacgatgtcaccccggtctgaccaagggaccgaggataggggtctgcaaggttcggcggtccaccaggttagttgtgatggtggtctcctcttgttcacttgtatgtaatggaatcgtcgtagactcgtggtgattaagcgtagagtgaatgtagcatgtcgtcaatgcgagatgatttgagccagctccagtcggcaaaggatgccgacagcgcctctacttaggccactctcgagtcgggtcaagagaccgccgcccgggtggatcggggctgccagagccggcacctccgggcccgaggtggccgggcagaccacaggggacctaggcgagctaggcggtgacatgacagcggcaacgacgaaggacgcgacggatcaagggaccgacgggggaattggcggtgggggctttgtgagctacaaacgagacatcgcatgcgcatatgcctcctcaccattctccgttgcgagcttctcccccgtgagcttctcctctgcgagtctcctccatggacttctcctccaccgagtcctcagccgcctccacaccactgacccgggaaggagccggttggcgaggatgaggaaatcgtggaagaaattccgcgtcggcagtgcgcgctgctgggctgcaggaa

SEQ ID NO: 51287 - DNA, 714 bp, Oryza sativa
attcctgcagcccgttctttcctctcagaaagaagttaagtagcacatgtcaagattttcacaaaatacataaatgtcctattttaatttcttacaaaggcatctaggtttatctgcaaaaaatatttgaaaattttatggtcaaattgttgctcatttactgtttctcttggttattagtaaacaaagtaaaaaccagccaagattttagtggactcacattaagactggcataaacctctaacagggaaaaatgagctaaaaataacaattttatactgacagttaatatttcttttgtaaatttggtattgtaacagtgactttagctttataacagtgaagttcattgatacaattagttaccatccagtgttcacgttttgtcgagtgataccattccatcatgttgtagtagcaatgtcaagtgtgaccattttcccttagaaactgatcccatctccactgaaacaagctcacctcctagatctagcctttaccttctttacgtccagccatctgtctgtacattgcattcactacatctattgcctagcctatcctcctgcaccttacccttatttctcacttatcctcccctatccatcccctcccttctgctctgcatcacaggcaggtgtggcatacagtagaaaccaataccttgtcagccactttgagctctgagcaccctactctggcatctatcttctc

SEQ ID NO: 51288 - DNA, 701 bp, Oryza sativa
ctgcagcctgttatgtatggatgatggaaagattatgttctgtgcatgatattgtgtgttctgtatgaatatctctattattatatatgatgctattgatgctcttattttaccataatcaatttcttgtacagaggaaccaatttcttctatagagaaaactgatgactgtacagacagtcagcttttcctgatctattatttttccaaacaaaaagttcattatattgcatttttttcagtgccacaataaatttgttatacgctcattatttagtctcataaaatacacatattgttcagttaacattttttcaattttttcaatctagctgccactcctacatctacaaggggattttagacatttggaaccacacataacgtgaaaatgaaggaaacctaacgggaggggcatggaagggatcacagcgaaatttcaggggtacacaggggattggataaaattcgggggtatagaagggattaggtgagttttggataaaattcgggggtatagaagggattaggtgagttttcatgggcacacaggggattttctctatattttagcattgcatttacatggaattagaatgaggagtattggaagaaggaagacggcggcggagcatggggcagcgtcgaggaagacaacagcaggtacattgatttctgcccatgctcccctactgcttgat

SEQ ID NO: 51289 - DNA, 814 bp, Oryza sativa
cctattgcagtggacaatatcgttggaagctctacaccaaatccatttgcatgaacaggtgatacacaccaaatccccttggcctacccagtgacatgcactggaatcttagcaactgtctgatcgttattaattcaattcatcactcgcattctataactctgtaacatcatgacaacttgggctttgatgattggggagaccaatagttgtcttaatagaagaaaaatcaccatcaccactaaatccattttcattgcactcaggcgtgcacaaatgtatagagatatggctgcaagtgaagggagagatcaatttgttgtagtttaggcttcaagtacaacaaagcactgccttataatctattttggtgttcacatttcaggaatcatataaaagtattttaaattatgtataaaaagatcagattgtatgacggtagccactgtgctattattaaagatgtcaattcaaatataatttctctggaatttttcctatgctaaatgaattatctggaattagatccaaagtcttggagcaagaaacacaaggtttgcttctccagcagtgcactgcatcttatattggcactctagaaatacactgtgctgttttttttatagacctatacaaattgtcatcctaccatggtctatgaaactctatttttatctgtataatttgtatggagtgcagtgcatagaaaataccttatttattgttctattttcatatgtatatatattgcgaaaacgtgtcttgcacgtgcacgataactagttccgtataaacaactcagcgcagttacctt

SEQ ID NO: 51290 - DNA, 783 bp, Oryza sativa
gaggctcaacggatggcagcgtatgcacgggatgggcgactgattgagcccgtggtgtggcggcgaaagggaaaacgaagattggcgtggcgccgcagcaacgaagggaaggcagagaccgttacggtagtagcgaatgcatggatggaagcggctggcgggctacggtgctagagacggccagcgagattgagcgagggagaaggccgagtggttttaattgcggatggcgaaatctgagtgtaggtggcacgacatcgagggcaatatcaaggggagaaggaagagtgccatcgacgctagccgacagggaaccacgatcgccgtgatgggcaggcgaagggtagggatttcaccattgaggccatgtttagtttccaaaatttttttcccaaaaacatcacatcgaatctttggacacatgtatgaagtattaaatatagattaaaagaaaaactaattgcacagttagggaggaaatcatgagacgaatcttttgagcctaattagtccatgattagccataagtgctacagtaatccacatgtgctaatggcggattaattaggttcaaaagattcgtctcacggtttacaggcgagttatgaaattagttttctcattcatgtccaaaaaccctttccgacatccggtcaaacgtccgatgtgacacccgaaaattttcatttcgcgaactaaacaggccctgatttaacctattgaattggaaggggtaaactgaactactcctttttatactagtatagactagaaaaaataccc

SEQ ID NO: 51291 - DNA, 2153 bp, Oryza sativa
aacaaaaacaacaaatttgacaatgaacagaatgcgtaaatcgtggttaaatttgttatttttgtttcaaattgtaaaagtcgaattttaacttacatgtttgtggaaaggtatatcatatattgatctatcttaacatttctttttaaaatttgttgatgattttttaaatgaaatgcacaaaatgagagggtgccctctcgagggataaaaatccatctccacgagtggtctttatagtggccaaggacttgctatcgacatgccaaaattcacctttttaacattatcaactcttgttcctgggtgattgggagagaaaacacctcgttttctgtacgcacacttccgaaactactaaacggtgcgttttttaaaaaattttctatagaaaagttgttttaaaaaatcatattaatccattcttaaaatttaaaatagttaatactcaattaatcatgcgttaatggctcaccttattttgcgtatcttctcaatcttctcttttcctctcctctcaaacaatccctccgtggtgtgaaggtaatctcacttgaattagtataggctaccatttacacctgaacattagaaaccggaaatctattgggcaaatacttattttgcgggtgaacatttttttattaaatttcagacttcggtgtgtcctatggtcagaatgcagtaccttttagacttattcattctggattacaaactctggaaaacggttggagatacacagatattacccaacaagaaaaaccaggacattccatttatttctctactcctcctttcatatatatctatgttcgttattcttcaatttctttcatgtagatatttattctaaagcgatgttaatccattaaattatgcatgctacatattaagtcctataccaaactgtggagattatggataccccatatctacatgacagttataatttagtcggatatatggtaccaaatatagacagaatatctctataaggactcgggttagattctaaacttgtatgtcaagaaaatacccgggatcctagtcggttacgattgtattttatctataatcccatattccgttaggatatggacggtactttgtaaagtggactccttcccctatataaggagggtccatgtgcctctcaggacgcgattcttttttccaatttatacaatcaataatacactcggcggaatcatccccggacaggagtagggtattacttcttgaataagaaggcctgaacctgtataaaatcccttgtctctaaacccatccactttcctagcttgatagccacccccttttattattgtcgaaatcttgcttcgacacaaatgtccctgtgttttttgtggtgtttctttttgctatagtctggtgtggaaaatatggtgaaggaaaagaaaatgctagatttctttaaattaaaaaggtaggttttcttttgctatccagattcaacatttctcatggctcattattttacaagatgatcatcttttggtgtaataatatttgagttttttgcaattaaccggtttacactaaatttctattaactatggaaagaatggtaaaacttcacttagagcacgtggttgtgaacttgtcaggttcaaatccaaatcttattatccatttcagaaatcaatcacttgacatgtgaagtcacatttgttcaagctaccttttggcttatttagtcatttcactgtcgaagggaagccacatttgttcctttcttttgtaacatagccattcagtggatataaaaagctatataccattctagcttcattcttccctgttattttcggtttgacatattttagtccatgggttgttgacagagaattaagaaataatttctttagtttttttttgtttgttgaaggtgaaacaaaaagtcggcagaccttgctgtgtggcaaacgaatgaggttgtggggtcaagagagatgagcaatccatattgcttgatcctaattcgggcatgatggtggaggcggtgagaagttaagtagcgtgaaaagcatagtttctcaaacctttggtttgagacttttacttttattttgtatattgattctgatggcggatattttgctggctacctagcgaaattcaattgccac

SEQ ID NO: 51292 - DNA, 1760 bp, Oryza sativa
tcatgtcgcactaccatcgaggaagacgtggccaaccacgtgccaccctcaaggaagttgaggtagagctctcgccatgttgcccatgccatgctgaggacgagaggcgaagctattctatgccgtgtcgagcgttgggaacgagaggcggagctcgttactttacctccatcgcatcaacaacgagagagcacatctgttggggatgagatatggagagagaagatacggataggggagcaagaggaaacgatttttgtggtgagaaatgtctccaagagatgttgggcgttcgatatttggcttgctatggacactcgatatgaagcgtttctgcaatacaagtagtaagattagataaaactttttaaactttctatcgacttttgaggtcacgactacgatatttggatggtatggagatcttcgatatttggtgtctattctgatttgtgcatcttgtgtcttggcttgtcttggtttttgttggtttgtccatttcctcctagggtgcttgtatttatacccataggtgtccccttgtccaagtagactagggagaccaatatggatacgatccaaatagactagagttgccctcagcaatcggagttcggtacccttcctagcccctagctgtttttatggaaaagccattttccacaaagacagcttaaatcttataaccaagcaagctgaagctgacaaaatcctagcccctagccatgaagttgggaaaaccaattcccgattgcacggcttagttaatacgcattcagaatagagcaaaggaacgatatgatcgacttcgagacagggcgatataagaaaagaggatcaacggacaaatattgcatatacaaacacttacagaggttgtcggagaatccatctcttgaacccatctcgtggagaccttgaagcatcaaaatccccctagcgcgccactgtcgactttttaggttacgactatggtagttgcatggtatggacatcgttggtaccagggtatatgcaagattcaggtaaaagagatagagacaagggtttttatataggttcgggccccttatctgataggtaatagccctactcctgttggccgaagccggtgttgctcttattcatctgaatcacacaagtacaatatttgggataacctatctagctgtcgtcgacttggcggcatagataaccaacacgtagtcaacgacagggtagtcttccttctcgagtacgaactcaccgagatcagagatggcgcaaatccctcttgtcggcttccgcaggcaccatattgggtatgtctaggctcatctctgatgtcaatgtctagcggcgtgtgttggtttgttctggcttgtcttggcttagtccccctcctcttaggggttttgtatttatacccatagatgtccacttgtccaagtagaactagggacaccaatatagatacaatttgagtagtccttatcatttccacatagaattctacttgtccttccttatccggaactccttttatatacgaggtatgattccatataagacttagtatatggtgggtgatgaaccctaagttccactcgagactcaaggctgttgttggcccgatctttcggtgagttgagataactacgatttgggagacacgttgacggcccaactacaaccgtacaagacattgcgttgcgccttagcaatcgatacacctctccatgggttgttgatcttgccggtacaaatcaaccttattcctg

SEQ ID NO: 51293 - DNA, 1071 bp, Oryza sativa
aatattcatggtatacttatggttacagatatgatccgcaagcgcacggatataccatttttttaatccaaagtgaagatatgataagagagtactatgctaataatttatatattacttgcgtacatcaaggtcgatgtaggggttaagtaattcaaaggttaggtgacacacagaagaaagaactatgatactctcactaaatataatccaagctaagtggaggaagaataagaaaataattcattcctatacttctaatatgcaaacatctttagtctacacttgttagtatacagtcatgcaaccaataccccctaacagtgccctcctggtgtttcgagagaccaccccgggttgccgagttccttacgacaatctgtaatggctgtccaaccggggctaaatacggaaaagtaccctccccaggaatttgtcttaggaatatatactatcatggaggaatacctgtactgagctgtcaccattagcgacccacctcgactgacccgtagcatatatgctcagatagggatacttaataatctagataccacgtctacattattaaatactactctatatcccccgagatgacatagagcaaccgagcaatcggacactaaacccacaccattgcacctctctgatagactagctacacaactatattgatacaagtataaaatgaagtcggtactcagataatataaatggaataaaataccgaagatgtataaagaaaaatattctattaattcaataagtcttacaaaagaagagaggaaagctactagagccatacccgaattctcctgaagacccgaggactaagaatactattctaattcctactccactagcactagtatactactaaacttgagagagggagagagctcttcttcttgagtgtgtggagagagtgaggatgtgaggtccttatatacggcagttatgacggttataagtatgcgaaatgtccattctgccccgcaactgccatcaggacatcatctagagcgtccaagccaaaacctggaatcaacggcagagatgggggtgccgaac

SEQ ID NO: 51294 - DNA, 939 bp, Oryza sativa
ctttccgctggcgccatgtctcaatccacaacggagtccgtcctaatccgggactaggccgcttcctagacgcactcgacggtgacgatggtgatgctggaggaagctgttgaggaggggatcctcccttctcgggatctcatcggctggcggggggccaccggggaggagttcccgaccctgaacaccgacgatatcatggtgttcctccccttctttaggtttggcctcggtcttcctgccgacgattttctccgagggctgcttcatttttacggtattgacatccaccatctcaattccaacttcatcctccaatcgccatctttatccatctatgtgaggcataatgcggtataaacccacacttcacgttctttcgttacctctatcaactcaagccatagccggggaagaagaaccccatggtggttggagggagcggcatccagatctggaccgagcggaaagcggagtttttcgatctcctgctcaggtctagcacaagggctggcactctaggtgtctactgctccaacttgttgcaggtctgcctccatataatggccatgccccgggcgtgaaggattgttggtacacactccctagccgcgatgagatggaccaagttagaggggtgctgaggggagtgcgtcttctaatcgatgctggcttgacctgcaacttcgtcacttggaggattcaaccactgaagagtcgtgttcacccagtctgggaatatttaggaaaggatgacccgaccagggagagcaatgagttgattgacaaggaccaggcttccgagaggttgaactagtttttcgagcccgagacgttggtcagcatggaagggtgctccaatcctttcaattgcagcaagaaatggccggaggtatgccctacccatgcctgcttcatatatatgtgtataaattggat

SEQ ID NO: 51295 - DNA, 694 bp, Oryza sativa
ggtgaaggaggggcattaccgggagagggagctctagggccagatttgttagctatggagggacggtgagttgctctggctgagagactttgtctttatgctagcctttttgatggtgtgtatatgttcgcagtcgaggatgagcgggagaggggcaaacgctaggcggcagagtggaagatgctggtggactaggctgaagcaactggcgggtgggcccagatcgtcgaactggaggcgtagttgcaggagtcctgacagggtgcgcaggatctacaagacaagttggatggtgagtcctgtaatgcgtgtttggtctgtttttgtactctgctattattgacgtgttttatcttgactgccacgcaagctgcaggtgattggcccacaccatcccgctgccccatcccgcacgcctccactcggtgccgcgtgctcctctcctgatcgacgtcttcttttctctccttttttttcgttttctaatttcccttttcttttctcgcgatcattctgtctcctccctctccttctaatctcctctacttcctcctcttttctcttttcctctcttttcttctttttttctcgatgtgtgaggctatgaaaagttgtaataagggattcttcatgtgatgacgaatgaagtgagcacagccgagttcaatattatatatgatttgggctgcaggaa

SEQ ID NO: 51296 - DNA, 1676 bp, Oryza sativa
caatcaaccaaacagctgcatgtgtatctcctcaaccaggctatactcagcctggataagagagatggaccaggctagagggatgcgagcaaccaaacacacccttaagtttagcattatatacatgtaaactttttaatagacaagatgaacagatagaaaatgcaattaaaaaacaggaaaaaaacaatcattagtttcaaaaggtgtgcgcattgcacagcatcgatgcacagcatgtactcatgaatagacgaaaaaaatgaaaagaaaaaaaaaagaaaagagaaagaaagagcgccgtgttgatgagctttctccgcccacatcgccgacatccacagtgccgcgccgccgtccccaacacctgcagctcagctcacttgcagcgtcgcccctggctcgcttgcgctgccgctcaccatggagcttgctgcgcgcactccccgcggtcctagcatccaaatctggtggccgctcgtcgttcgcggcctcacccccaaaccatggtgttgccgccgctccagatctaccgcttaggagcttgtgggcaccggatccgtgcggtccagtcgctagagaaaggaggggtggagtttctggtggagaaggtggtggaggctacgacaagaagaggaggaaggcaagccccaggcaagtttttggtggagaagatggctgtgcggcgacgaagatggcgacgagccgagtagaggccaagcgagcaaatgagggggagtgaggtgaagggagcgcgacccctctcgccctcctgcatctacgcatccccgcgcctgcaccggcgcgtcacgccgcctgcacaagcgcagcctggatgggagcgaagctcaactcgggcgtttctcgcgggcctggctgcggaggccgttttgcacgtgtggatccaggccccgacgaccgtgcaggcaaccaaacagcctcctcttgcacccatacatgcgagccaccctccatgcatgtaaccaaacacgcccttagaaggaggtgtactaactgtcgaaggaggagctcatcttcctagtgccgacggtgcttgaggcttgagtccttgaggggcggcaccataggagccatctagctcggcagctctagcagcagaccaggtgaagggaagagagagatctaggcagcagcaggtctagttctagcagcatatcagggtggcggcttgagagagggcgacggcttctgagaatagtggtgacatgcagtggcggatttagtccatttctgtggggtcggctgaccccacagctttttgaaaaacatcttataaaccttgattttcatgtataaatctaaaaaaaattatagaaatgaccccacttaaatataaaccactagtaattgaccccacaggtataaaatcttggctccgccactggtgacatgccctcatgactaaaccctaaggagaatggacccagcttcacatgcagccaagacttgttgtgagatcaatataggtgctctaatcggacgattaatcgtgcctgatcgccaattaatcggacgatcaaatttctagtcaacctgattgaatgaatgcccatgatgggatgattaatcgtgattaattggacgatcagataagatttctttatagattcattaattaattgttctgaggtggatatcaatttgatagtagatca

SEQ ID NO: 51297 - DNA, 689 bp, Oryza sativa
ttcctgcagcccagcttgtaatttttcttctactgtatcaatagaacttcgcaccgtcttgcatcttgtacgagttattcaaataaaagttcaagtccggaccacccaatgtcttaaaaaacagtccagaccattgaaatccctgctagctcattgcccgtcggtcactggaccagtagggatgtttagcatcattgccggttcatggcttattggcaggaaaattccctccaatgccatgaacctgcagtaagggttggctcacgttaaaccggtagtgatgaataggaagggattgctctttctgtacgagtgagtagccaaaacttaaaatcctaaatcactaatatatgaaaaactaataagatttgttttgtgaaaatagtatcagtgaattttatatgaaaagtactttaatgtagctatatttttcataaattgaatttaaaaaagaataattaaaaacatgtcgatgtcctacgataggtaaaaaagaaggaatggaatatcactcgctggacccttgaaagcagcagccggtagaattaaggagcaaggaaagaatctcaaaggtagggtgtgtgcgcatgtggagggtaaacctaacctaaggcaatatgcagccagtgtgtccactgacaagtgacaactgtagtctgtagagtagtaaagtgtagtagtgacagtgt

SEQ ID NO: 51298 - DNA, 630 bp, Oryza sativa
ggttttcataagtggtatggtgctctaagatttttatttttgttttagagagtgaggttgatttacatagttaatgaacagcttcacactcataccaccacagttcaacaaacatgcgcccttcctatctagctatgatgtgctcttcgatatcgctagttatctttcacgagatgtaagtatatatttgttcaaggatgaccaatgacgtccacgatctattatactctgtcaccaagcatcagacaatcctcacacaacaactctgatggttatcaaccgtaagcacaattgatttgactacgaagtattattcttacaaagaaatcggataaatatggaactatcggtataaaataagcacaactgatttatcataagagttaaatactccaatggttctgaaacttatcttcagatcatctcaaaactctaaaaaagcatatttagaccccctgaacttgctaaatttacaatcaaaggtcgaaaagctcagtttgaccatcctagtgccaatgtggcaggccaacacacagagacctgctgttggtccttaaacactagggcatcctccttgggcaagaaaactgtggatgagaatgagaaagagttgagaagcacatcagcaca

SEQ ID NO: 51299 - DNA, 1322 bp, Oryza sativa
tatagacctagcggattagatagccgagcggaggcagtatccctgcatagatggttcacccctgagtgaggcaggtgcgctatgatgggacagccgttgaggtagggccgagaggcgtgccctacatcggtgtcgccattggtaggactgccatgagtgtgtgagagagagaacttaacttgaaccataatttaatatgtgtgagacttctctttcccggaagcgccagaactcctcacactgctagaaacatggacgcctagagtgcatgaggatttaagttcatggagcgggtactgccagtgcaagcttatctaaaagctttgccgtgacgtgtctcatgtgttgggacgaggctcatgtgttgggcagtcacggagtgcgggtaaagtgtacatccactgcagtgtgagtaaaccaaatctattcgaatagccgtgctcgcggttattgagcaccgggacatgtattacacttggctagactctaaattcttaacttgtgggggatgggatattgcatgatgaattttatgctgatggagccacattctgagaggagggaaggtggacatcctcagaaaaccatgacgattcaatggcgggaagctatccttgggatcacaatggatggtggacagaaccgtcgttgtttaaagtgaacactggtgctaaaatttgatcagtctatgctaggttttaggcttgtgaaaagaattgtaaaattagctttatgcaaaagaacctgaagccattccttgaaataccctctatcatatgcattgttgttgtggtggcttgctgagtacggttggtactcacccttgataattatatatcttttaggagagtgttgaagagaagcccttgtcggtacgcttgcgtatccaacaagatgatcggagtgcggtcttgttctaggtctcgttccccagtcgactgcttgtggcatgttaaccgggcccttatattatttggtcttctggtgttgttctctgatagttattggcctacctggccctaatgtaagtatttaactcttttagcctgaattcattcgtgatatgttgtgattcaactatgtatgtgtgtatcaactactgatccagggattggtacggataaacacagatgatttccgatttccaaaatcgggggtccacagcagcgggtgagatccgaggttttcgagacaaaagagacacaaggaatttatacaggttcgggccgctatgaagcgtaataccctactcctgtgtgtatgatgattcttctgtgcttgcaaaagcctctgaatctccgatgtacaagctagggttagag

SEQ ID NO: 51300 - DNA, 818 bp, Oryza sativa
ataggccatagggctagcgaaatcaatcttccgccgcctgctgggaacgacgaagtcgccgtgcccgagagttaagcacgttgtgcctgccggtgagcgcgccaggaacgtggtgccgccatctacgcttctccgatggggtggatctgtcagcacgccgaatctccgatgagcatgttgcccctgccgccggctggatagaaccggaatatatatgcgagcagttctacaccgatgccagatccgatcatcaagggataatcaaatattccagcttttctttttagaaaattcaaaatcggtctgctgggatccgatacgcaggaacatgtgtgcaatcgatcgataaggtacgcggatggacggtggatgcggaccaggagtacgtactcccgggagtacataaacatttttcatatatatatatatatatatatatatatatatatatatatatatatatatatatatataaaatcatgagcagcacttaagagtccggtcgtctcaagttagcatgcgagtttttttaaacaaatttcttatatggttccttctgtattaccaaaagtaaacgatgttaaaaaccgactcaaatacggatatgtattttcaaaagcaaacgaacttaaaaaccgactcatacatagatgatatacaaaaaataccggcaaaaacatcttcaatttttacaatagtagagatagatttatatccaaaagtattttttcataaggcgttaatgttggggctattgataatatatatactatgtgaataatcaaagtacaatattaaagatagtataaaaagacaac

SEQ ID NO: 51301 - DNA, 551 bp, Oryza sativa
acatcacatatagttaaaaattaactaacttgttcaatgtcagtcgaaaaaagaacatttgatttacaaaaaaattaaaaaatcatagacatttaatttttcaaaaacataatgaaacagaagaaaaataataataacaagaaaatactaaacgtttatcatagtaaataactcaatatgctaggtcacgtttattatagttgatgaatcacacatagttaaaatttaactgactaaacatgaatatatatggtgcgctatatagtagtaaaaatttaactcgtgaatcaaagtgggtggagtcgggaggggagtggggtggtgtcacgcccagaaattcactagtaatttctgaactaatttgtgcataaaaccctcgtccaggaatcagccgaggtacacaaactgacaatttaatatacaaatccatcaaaataataacgttacatacttacaaaagaaaagaaaactgtagcggaattacggtctagcgaagctccggctccactcccacaggcagctcaactggggtataagccaaatatcttctc

SEQ ID NO: 51302 - DNA, 549 bp, Oryza sativa
gtaacttaggatagaaaatagtaacataagtatagaatctggcactcgtaattatattccaagttacaacaacctctaattcttcatgttgttttcagccagcacagtttcccaccaagcgactcgcatgagcttgttcaacttttgctaaatattataaaaatttattattcggggttatatgtgttctaataaattatatagcactttgcaaatttattcatagtaagtcatgtagtatatatactaacctaattttatgattcttaattataagatgtaagagggaatctttagtccaggcttaggctcttacaaacaaaaaaaatcatagagattaatccttcaaaatccaaatcctttgtttttactccaaaccgaataactccaaaagtttatcattgtttacatgtcctgcagctatagattaattacccaattttagagatgaatcatcaattgaagcttaaataatataacactatatatattctaaaacaaagcagtttcattaagaacaatccaacttaattcctttattaatttccc

SEQ ID NO: 51303 - DNA, 726 bp, Oryza sativa
ctgtttcctgggactggtatcgattaacaggttaatttggagcgtcacgggctagttccgctcggggctagttcggggcgtgacaatatgtgtctgcatagtctccaatattatactttgtctaagttttaaacaaactttataatttgatcattattttttataatatattatcaatagtgtgaaatatcatatgaattgtccaattagattttgtatctattgaatttgtgttgtatccgctttacgcgatgtgttacttacgtgtgtgggaatggaggccatcgctcggtcgcacttacaaataaaaaataattgatgtgacgaacggaaagttgcaaattttttaattaactagttaagaagttggattcaacggtacgtaccgtgttcagaaaatggaagcgtgtccataaaaatctaatagagctagtgattaaaaagaacgaggcgaaacttataccctagcactatactgtacgttttgccccttaattaatagaactgaggtacaaacgagggtcagtgtgcaaggtcggaaatgatcctcgcgtgacttcgtcaagtcttcagttcctaattataacatcgggcaaaagttaagagatcgattaggacagtgtgacatcacggcccaatttgaattagaaatgtgtggtacatgcatgtaagctgtgtatgtatgtttcataccacattgctagtttagtaaaagtggaatcaact

SEQ ID NO: 51304 - DNA, 725 bp, Oryza sativa
ctttttaatatatgtcatctaccaaatataatctaatatttttccggaaaatgttttaatcttttctctcaattataaatcatttgtaaattgtttaattaatttggaatagtcttttctttaataggtttaattggaatttaatcttgtaaaatttgtaattaattcatatgaaatcggaatgaggtcgttcaagtctctaaattcatctaaaatcatgatctacatgtttgtttactttatatgtactgtttatttggagtttcttagtctttttcctcgttttgcatgttagcttgtcgtttccgtcgtttcgaaggttcgtgagtgcgtcggaagtattcaagaagattaattgaagaccctttattgcaaggcaagtcacagatcccaaacataattcctttgagcatgttgatcctacatttaaattctctatttattttaattgtgcatttattttcgaatgtcaccgggtggtgagcctttcccatttaattatggccgaagatgactttatttacctatgggttataatttgattagctagaaccttatatattggtttggttcagctagatgcttataatagatgcttagccgtgcttagaaacaatagctcactaatgggataaatcatgcttcactatcacttatggatatttaatggaagctcacgatggttaatcgtgattggttaattaattaatatgccaactaaaact

SEQ ID NO: 51305 - DNA, 754 bp, Oryza sativa
  unsure (1)..(754): unsure at all n locations
atatcaatcctctgtagccccgattgctgcagtacagcacccgcacgatctccagctacacatccatctgcgcacccttacgttggtatactccaccagctcagatcgccggcattgcacctgatcagaagccaagcctccataactgcaggaatcaagcagcaataaaatccggttaaaacacaagaatccaanntttgncccccatcactgcataggaacagtgatcgatactctgcaaacagagctactctcgttctccaaaccgggcgaaatgcttcaggcacctaacaatttggccaagttaagcaccgcgaagacttgggtgacccgagttggagacttggagtcaacaaagcaaaattatcttttctttagcaaaaagaggataagaaaagaatataaacatgataccggtttccttaataaatctggaaattacctttggaatatccctgaagagtgagggaacgagcggtagcactaacctgctagaaaaatccatgtagctattgccggagattatggagggaatcgcctgtattcctccgccccgcccacccattcttctccggcgacggcggcgggggtcgcactcgcagcggtttccccacccgtccagactatggtgggcccaaacctaattttatcttggaataagttcactttgtgaccctgaaaaagtgatcgaaatctaatccgtgaccctaaaccacgaaaccggatatctcgacccccaactctcaaaaccggt

SEQ ID NO: 51306 - DNA, 1250 bp, Oryza sativa
ttctggcacatgcatgaccagctggcaatgacacaacgggagagagcaaggagggcaccttagcttagtgctggccagcctagccctagaggtggctagtcctgctccatcatcggctcgtgcgatgacaacggtggtcatccaccatcgtccccatcattgtcgccgcgtcctcccctgcgttggctaaggctcgagctcttaccgtctcgagctcggcacagaggacagtttcagcgatgcggtcagtaggctagtggtgcgataatggggaagcaacatcccacggcggtgctcaagtgatcgattaccctctgccgctggcctactaggttctacaatattatttttatttaagctaatcataacatgtgggttctgttgagttcttttatttatttttctaatcatattctctcatagacatatagcacgatgaacaatgtcacatagacgccaaatttatagtgaggtaggcagttaaattaatagctacgtggctctcaacggaaagtaagtacggcagacagaaggtgccacatagacgccaaatttatagtgaggtaggcacttaaattaatatctacgtgactctccacggaaagtatgatagacagcaggtgtgacaaccatgtccatcatcccttctatccccacgtttacttacatagatctcttggtagaccagggatgaactggacaccaattgatagatttttatttagtttaagcttagttaattaattcataggaatcccctctagtttaagcctaccatttgtatggtagaatcatgtttgtagatatacacatctattattcgatatccttgaaatactgttaggtggagtgttgcagcggtattcatacacttggatttattggtaactgtaacaaataccaataataaccaactacaaaacccagacatgggtatcctaatatgtttcactctaatatttcacctcaaaacaatattactcagacacatgtttaatttttttttgcggggcagacacatgtttaattaaaaccaatttacactattttggtgtcatgtagagctttctatgattatatacttacgtatttatatggagagatataatatgctagctaagctaatatctatcgataaaggtcaaaagaagaacgatctgcttctttaggagtagtgtatcggccatcaggtcaggatgcaaccaatcccattctagcctaacatgtgtagaactgcatatcaatcaacc

SEQ ID NO: 51307 - DNA, 1492 bp, Oryza sativa
  unsure (1)..(1492): unsure at all n locations
aaagtgaaaaccagagttatagatttttttttaaaaaaagtggaatctagtttgatttaatttttttcaatttggctgtttattgagcggtttgtcaacccaagtaggctcgaaatctcaaaaatttgtgaaaaccaagcggtttgttactcaagctggtttgaaacctcaatatttcgtgaaaaccgaatggtttttgtcagttttatggaaccttgagggcaacaagcatgtatttgtacatatacaaatgttttgcagatttagcacatccaccaaaaatattattgtcgtatacaaatatatgtatagaacgatatgacagcaataaattatacaagatataaagtcatttaatgtttcttaaggaagttatgtcatttaatgttggaacatatatctaaaactacaacaataatatgtaaatggaaaaaacaataaaatgtgtaaagatttgggatgtttaatctatctaaaactacaacaataatatgtaaatggaacaaaaacaataaattgtgcaggagatggcataaatgcaagaaaccatcagtacatctccaagattaagttggttgtgcatatatataaacatgagcagagggccatggcaacgagcacagtgaacttgaagagtggaaaatcataaatacatataggaggagaacttaattatcttcttaataatggcagttgcaaggaggatggtgtcctccatctctgtggttttcttcatgcttcttctgatcgtggcagattccaccttctcatcctgctatgcattaacacgtatgcagcaaagctattaattttactctgcattttttaaaaaatatccaaactacactgaatatgttttctctgtataatttgaggggttcatgatatgcctttttcccccctcttttaatttagtttgcaattagtggctcatgaatcatggatggttgaactgaattgcgtttttgcagctagacaaacgtgcaatgacctaggagatttagcgtgcactgacgagacgtgcaagaagatatacggagacagattagaatactactgcaagccaggcgtcacccctacggtatgctgctgtatgaacgtcacagcatcagttcccagtggtgtcaagaatcaaaacggcgatacgcttcttaattagttataattgatcatgttccatgtaaagttcgtcgatatgtttggagtttggtgccaactcaataaataaacatgcatacataatttgggtttgttaataaaccggttactgaattggctttgnnnnnnagtgttgcacaaagtgttcccctccagttaactactccatgattgcgtactagaggcagcagagaagagctttccaatgcaatctgaaacgtacgtgttcttttgccttgttgcttccgacgtacgttacgtgacatgttcaatgtctgaatctccagcaattcagcatgaaacacagcccgttctcgttcatgtagcaacgaag

SEQ ID NO: 51308 - DNA, 527 bp, Oryza sativa
  unsure (1)..(527): unsure at all n locations
catctcccaccactcatatagacaatcaagctcttcattggatggggcaagttgctaataggtggtccagtttgtcactagcccctggattgttagagtatctgtgagtgaaatgaatgttctattaccacatagtggctagtgaataatgtaaattcttttagaatttttttagagaacgacggtaggaagatctgnccnnntctaaattagtggaaaagggccgaaacccagcaaagagtttacagagtttacatggactataacaaagaggaaatacagcttaagaagaaaataaaatcagggggggcttaaaagctattttgcacaaatccatatcttgtttgataaggtatgctacttcatttactgagaggcaagaattttgaaaaattcttctgtttctttctagccaaatattccaccaaagtagttagtagtgtgcctctgataccctgcatttgaactttgcttcccacatggttggttccattccaccaagtttcaacatcatggggatggggtgt

SEQ ID NO: 51309 - DNA, 629 bp, Oryza sativa
ttcagtgcaggacctaaaatctctctttcgggttcagggcgtgccagttggtttgatcctgcaaccaacaagaaactaaactacagaatagcaaagttaaatccacaatagccgatcagccacatgccgatgacgtatcatttgtaggttagccaatataacgtgaattatatcggcaatgataaataaagcaaaaggaaagttagatctagtcgatcggctgtagatattagcaatatataatctatagatcgagatacatttaaaccaagtgactagtatggatcggaccaagtgctgagacaacatgaatcacttatgtctaaaagtactttaatataaagattatacgtgctcatagcatagccgatgttgtagacctaacacgtgtcggctaatactccaatacaactttatactaagatatcattatagaccaaatatattgaacaagaattaatcaagtgttaaagtagattaacagattaataataagcctaatatatttaataacagtgagatcttgatataaagggcagatttagcatgttaagtaaacatgaagtaaacaaaacaactaaatcagataagatcggctgaaacccccgatgaaaccctaatcggcaacc

SEQ ID NO: 51310 - DNA, 763 bp, Oryza sativa
  unsure (1)..(763): unsure at all n locations
gttgggcctgtgcctcctcaacgaccatttcgatggagaccgtacggacatggggcacatgcataaatgcattgcaaaagcttcaagttggcaaaagtaggaaaatcctgtacactgtactataaaccaatccatctgcattggtgacatttgtgaggctttgaacgggacaccgcgggagcacataaacaaagcaatatttcggcaatcattagttactccctccgttttctattatatgcgccgttgattattttagatatatttaacattcatcttattaaaaatatataattattatttattttattgtgacttatttattatcaaatgctttttaaacataatattatatttttatatttgcacgaaaattttaaataagacgaataatgaaaagtttgttaaaaaatcagcggtgtcatatattaaaaacggagggagtataatacttgtagaaaaacatcttactatagattttatatatgtgttgtccctataagtaaatcaaagaagcaaaattctccttttggaatatgacgtgctatctctgtgtgacacatgtgcgaatttgagccgtcaaccatctccatcgccaggcaccgaaaagggccaatntaattttaatgttctattacaccatatatatgcttctatcaacggtctttattgagtttttcctctgtcggaacaaaattatacaggaccttcgtcctttgcatatttggaaagaatttgcttctccactgccacgtgtccgcac

SEQ ID NO: 51311 - DNA, 724 bp, Oryza sativa
gaaaccgataccgtgttggttaaggttgctatcttgtaatcctgccccccatcctatataagggggcaggaggccctctagggggcatgagacaactagatcgtcagatctatattacacccggtggattcaaatctccaaacaggagtagggtattacctctcatcgagagggcctgaacctgtctaaatcctttgtctctgcatccatccacttttaggtctcgtgtgctacccctttttattattgccgaaatcatgtttcgacagttggcgcgccaggtaggggtgcgtcgagttatctacgagaagtgagatggaaccaattagaaggcgccgaatcagattcaatctagcaaggaaaatcaacctcagcaagttggatcactccaatctccgacgtcaccaatggtggtgaatcctcaagatgcagctcgccaagatgccggctggagctgctatacagtccgtagccaaaaaaaaatcatctgtatccaagagatcatcggccacgtctccagctaccagcctgcaaaaccctgcttgatcgtactgctctgcatggaggtcggccacgggagtcaccactgctatctggacaggcatgctggagcgatggatgttcacacgcaccggatagcaatcgagcctccgatccagtcgtcgtcgtcatcgccgttttctgttatgctcggtgagattattgctgagatcaaactggacgc

SEQ ID NO: 51312 - DNA, 2200 bp, Oryza sativa
ccttcttttgttccggtgttagtttgtctatagtgacagaaacgatgtttccctcatggacttcaaacccactaggctttgggatattagtcttggaagggacctccgacttgccacccgaagacggtgacggtggtggtttttcagccatgagagaatgttgttgcaactctaacttctaatcagtcccactgggcgtgccaaaagcgtgttaatgtaaaaacacgaggcctgggagatctacttaactccagtgcaggtccaaaagcttgcctttaggtgtatgagcgtgccagttgatttgatcctgcaatcaacaagaaataaagacaaagaaaccgcggttaaatccataaacgatagccgatcggctagttgccgatgacgtatcatttatctttgagccgatgtcatgtgtagatcgatcggcagtcatgaatacgtaagaaagaactaaatctactcaatcggctgtagatattaacaatatataatccttatgtcgatatatacttaaatcaagtgattgggatagatcgatcgccatgccgagacagtataaatcacttaggtcaaaatatatactaataacaacactatatatgttcatagcatagcagatcagatagatctagtatgtatcggctaatactctgataccaatctatattaagatattagagcaagcagaatataccaaacgaaagcctaatatacttaaatgcaacacgatcttaacataaagggcagatttaacatgtcaatcgataatataaggaaaaagtagttaaatcaggtaagatcggctgaaaccctgatactaccctaatcggcaaccaaaagcaggctagagattgagattctaatcacgactcataagatcaaactcaactgatgcagctataagtatgaaaagaagaacaatatctagacaatcaagccgttggatgtttcatagagtggtagatatcctatataatctaagtcaacatcgatatttaacctaatcggatgccttctagtaactaacagccgattggcggttagataacgatattgccagagattatataagatatatgataactcgacaaattacataaacaagattagagtgacatcaagatggaagcactaatcccgaaaacgcaagccgccataacaagttttacctctagttgaagatcgaaacagatgcagctcaacccgaaagcaagaacttgtcgaaacaaaacaaaagtaagagggtggcgatgcgctgagattacatggggctcggggtctatttatacccgagattagaaaatatgtccatgtcggacacgactcttatctctaataaactctaagataccataagtctttgcggcagacttttgcccaaacatatctctaaggaaatacatgaaatatcctaattaatagatacaattgacttctcaggactatatccatacgtggcaatcctcatgaagcacatcaactcaacccgacaacgtatgccgtgtcatattgtcagattcggttcaatcggctaaccttgtccaactcagactctgccgatcctggttgcagccgattcggacttcagccgatcccttctctgtttccggagcgatctccatctcgaattcctctttgatcccatcttcatctccgatactttgattaccaaatttggtcgttaacagtaatgcatcacaatctccggtcagcaacaacaacaacaatgcatcacagatcaacaacaacaaccacaagtcttgggtcaacaacgatccaatccatcacaaatcaaagatcaacagaagcaagatgcacgtactcactccgccgtccttccttggtcccttggtcacacgccatcgtcgtcgccgccgccgccgccaccaccgtacgtcgccgtcaacccaccaccccaaccagatttgggcgccattggtgggaggccgacagagaaggagaggaggagggagacaggatctgcgccccgtctcccgcgaggaggccgccaaccaccttccttggccaccgctgccaccgcacatcgccgccaccaacccaccaccctgaccaccccctccccagatctggctgcttccgatgaggccgacggagagggagaggaagaggggaccggatctgcgcctccccattcgccatggggaggcccccggtcaccccggccgctacttgccgg

SEQ ID NO: 51313 - DNA, 726 bp, Oryza sativa
ttgttctgcattggtttcgatcttcaactagaggtaaaacttgttatggcggcttgcgttctcgggattagtgcttccatctttatgatactctaatcttgtttatgtaattcgtcgagttatcatatatcttatataatctctggcaatatcgttatctaaccaccaatcagctaacgtctgttactagaaagcagccgattaggttaaatatcgatgttgacttagattatataggatatctaccactctatgaaacatccaacggcttgattgtctagatattgtccttcttttcatacctatagctgcatcagttgagtttgatcttatgagtcgtgattagaatctcaatctctagcctgcttttggttgccgattaggatagcatcagggtttcagccgatctgacctgatttaactactttttctttatatgctcgattgacatgttaaatccgccctttatgttaagatcttgttgcatttaagtatattaggctttcgtttggtatattctgcttgctctaatatcttaatatagagtgatatcggagtattagccgatacatgctagatttatctgatcggctatgctatgaatatatatagtcttgttgttagtatatatttcgatctaagtgatttatactgtctcggcaaggcgatcgatctttcccaatcacttgatttaagtatatattgacataaggattatctacagcc

SEQ ID NO: 51314 - DNA, 672 bp, Oryza sativa
tgcacgcaagaaacacgtatgcatgcatgcatgcatccacggttttgacgaattccaccggatcgactccacgtacgcctatcgacgcgacgatcgatggttttgatgaatacctaggtagctagtatatatgcaaaactaaacgtaccaaacatattaaccgcatatgagaagtctagatatacggaagaaatatattgatcggtagccgaccgctgggaacccaacaacgtcttgcgttttatcacttctttcatccaatcatttgataaaataggacccattttgtcatctttattgggccgcctcaacagccgatggaagccacggtgcgagttgttacttaattttgttaagactatagatggccaaatgagtcgcctggcatggcccagccctggcaggaccaaggcatggcctgtgattggttgggttggcacaaccgaattgacatgccgtcccgtgtctgcgttgctagctagggccacccacatttttcccacccactttgcctcgaacgggggatcacaacaactcgcttgaaaacacgcatgcatgcatccacggttttgacgaatttcaccgaatcgactccacatacgcctactgatgcgaagattgatggttttgatgaatgcctacgcagctactatatatgcaaaggtaagtgta

SEQ ID NO: 51315 - DNA, 785 bp, Oryza sativa
tttttgcatgaaaagcacacagacactttctgtcaatcgtatatgtgtagatagttatatacttatatattactcccccggtttacaatttgttgtcacttttgatcgcattatttgcacacaaatacttgccgagtcatgcttcctgatacatgttttcctattttcccatattaataacccttattactattttctccaccactggctattttgtggtctagaattatacgtttaaatttttttgaagggtaatatatattatattttcacatgaaaacaaatgtacgtagatatacatgctatggttaaaagtgacaagatataacgaagtagcctgatgaatcctgtttttcttgacttgaccaaatgttttgagcactcctctttaaaagttcttcctttatataattatatgtgatttccacctagtggccagcagcagcgaaaatgctccaatgtgggcgcccgatctgaccccaaaaatcggacccttgcacccgcacgagccaattgtttttttttttttttttttttttttgagaaagaggaggcagagccctctcccattttcattaaagaaaacgattacaaggtccataaaatctgttaactttgatcatcttataaacaaacacaaaacacctacaagaatccttagttcttcaaaaaaagctagtaaaactttctcacatctatttatctattatattaataagacagctcaaaaaaagacaccacgtttatcgtggaggctagaaattctcacgttaatcgaaaaaaat

SEQ ID NO: 51316 - DNA, 1033 bp, Oryza sativa
attcccagcaatagcgcagaaatacttctgttattttatggttacagagttcatccgcaagcgcacggatataccattgtagcatttcacccgagagtattccaagggtatcgtatttattttatcccgtgggaagatcatgtagagagaacttgactaataatttatatattagttgtgataatcatattctaagcaggggttaagataatccaagggtagagtgacacacaagctctagctactcattctcataatatattatctaagctaagcggaaagaaaagagagagaaaatctattcctatacttctaatgtacatagtgtacatacattctagttaaccgatatactagctaatatcctctatccgatgccctcctggtactttgagaagccacccctgactgccgagttccttatgacagcccgttatgaccatacaaccggagctaaatacgggggaataccctccccagggaattaacttaggattatataccggcgtggaggaatacccatactgagctgtcaccatcagcggtccacctctcatccgcagtatataatcccaaataatgatatcccgtaatctatacaccacgcctaaactaccagatactactctaatatcatcgtcatgacatagagtaattgcatatgcaaacattatacccgcaccaaagcatctcccagataagctagctgtatattcagtataacatgaacataatgtaaagtaggtactcatatactcagaaagtatttcaataccataaatgtatatagaagagtattctaataaaagtaaaaagcctacaaaagaggaaaggagagctactagagccatacccgaactcttccgaaggcttccggactcctgatttctattgtattcctattccaccagctagatactactaaactaaatttgagagaaatgagagagctcttgcttgaggtatgtgttgaagtgaagatagtgaactccttaaataggcaggtaatgatggttatggtggttggaaaggt

SEQ ID NO: 51317 - DNA, 711 bp, Oryza sativa
tagaataaaaatgtaataccagtaataaatatgtaaatattctttgccaaatatgtatatttatctatatatattattaagaaacatagaaatctttattattaagacaactcgaaaagaatgtgccatatttattctaaaggatataaattatcacgttaatcgaacaataaattccaagccgttagactgtggtggaaccaaattagaatggtgaagattgataacagaaatatatgtaatataagtgtatctttagaactaaacaatggtatatagaggagtaagtgacagcatttgatgaaacttctaaatattataaaaatgaaacgaaacaagataataaactctaaaaagtataaggtccaatttttaaaggtttgggactttagaaagtaaaaaaaacaatgataataaagttccaatttaaatcacaatgataataaagagaggagggagcatgcgagccatagaatagtacaatggcaaagccgataatggtttggtgggacttatagaaagtaaaaaaatgaactcaaacaataattatgtttgatttttagaatcctaatgacaataaagagaggaggtagcagatgggccgtagaagagttcagtggtagcgtttgatgagactttaaaaatataaaaatgaactcaacgagaaaataaactctgaaaacaaccaggtcctatttttaaagattcgga

SEQ ID NO: 51318 - DNA, 899 bp, Oryza sativa
tatataaaagcgtctctatatttttgtagagatgcaatttacacgtctctagcaacgtcttaaataatataggtacgctttaaaaagcgtctccataattttaagacggtgcaaacagagacgatcctacgacgctttataaaagcgtctcagttatctgtgggagacgaaataaaacgtctctatcttacaaataagatgtctcctttgggttgttttgtgggttgttttgttgtagtggttctctacgcgtaggtgtcctccaatcacccggtcgaccgccctagctccggcgagctcgcaaaccctaaccggccgccattgctgacgtcagcatgacgtcatcatctcctttcccttttctttttctcgattttctaatagattaaaacttcagaaaatcataactaaataaccgtagatctgtttcaggtggttcaagtttctaaattcttctaaaatcaagatctacatgttaaaaatatccacatgtactgtttatgcttgtttttgtactgttttgttgatttttgtttaattgctttagtttccgacgttccggaggaaagcgtttctgttgaggaaggttccgaagcgtttgtggaagcccaaggcaagtcagacagatcccaaacaaccctttgagcatgttgatcccgtttaaagctattattttatttcaactatgcattgttttcgaatgtcatcgggtggtgaacctttcccaattaattaatggccgaagatgactttattttcctatgggttataatttgattagcatgaaccttatatattggattggttcagctaaatgctatatgtatgtttgcttagccatgcttagaaacattagttaactaaaggggttaaatataaatctatattacaaaattatt

SEQ ID NO: 51319 - DNA, 565 bp, Oryza sativa
gatcccccggtgttttttgcaatgaacaccctattatgccatcctttgttatcctgtgcacttgcatatttgctgcgtggcttgctgagtatgtcatatactcaccttgcaatcattcatcagaggaagagttctacagtgaagctgatggtgtggaggattaggtgtagccctggtcaagctgcctgtggagtggagtcgtccgcgccgtttatctttttccgctgcttagatctttattgattgagaggaactatctacctctgtaatgatattttatacgcttaataattagagtaataactatactctattatcaatttgttattgtgtgcctcggctgattcctggacgagggtttacacacatgtaagcgtttggaattttggatagaaattccgggcgtgacaagttggtatcagagcccccttgaccctaggcttatgccaaatggttacccatagaagccctctaaaaatattggaaaagtagaactgttctcctccctttctcttttaattaaaccaaactaatggcacatgcatttcataatctcttttaatgg

SEQ ID NO: 51320 - DNA, 954 bp, Oryza sativa
gctccgcctagccgccgccgccgtcggtgacgtcattgccgacgccatcggggtcgtccgccgtgagccgccgtggacccgatcgatctcggccgtccgtttggattggatcgaatctcagccgtccgttcgcgtgaaccgccgccgtgcgcccggtccaccgcaaaccctagcccgctgacgcaataaaccttcttttccttttcaaaaataattcattattgcgtcataattcaatttaaaccgatttaagtgttttaatccgatttaatctttaaaaattcataactaattcatcttagctccgatttagttggttcaagtctctaaatttttctaaaattgagatctacacattaaaaatatccacatgtactgttcatgcttgtttatgtgctgttttgttgaatttgttcttttctgcttagattccgtcgtttccggagagtccgttttcgccggagaagaatttgaagagttccaaggccagcaaggcaagtcacacagatcccaaacaaccctttgagcatgttgatcctatttaaagctattgtttctattcaactattgcatttattttcaaatgccattgggtggaattaacctattgtttgttatagcccttttgttcttgattaccttattccttgataccttgggttattataacttgactagttgggctttatttattggttcaactagatattagatataattgctcagccctgcttagaaacattagcacactattgggataacttatgactcactgttatttaatgatggcttaatgatagttcacgatggtcaatcgtgattggttaattaattaacgtgccaactaaaacctgataatggtgggttgtgagcacatggttttgatggtcgtgctcatgacaattaaggaccggttcacgagtttcggttgtgaaacattaaccgtgccaacca

SEQ ID NO: 51321 - DNA, 588 bp, Oryza sativa
  unsure (1)..(588): unsure at all n locations
cgacgactttgccatcctcgcaagagcagcagctgctgctgctcctcgctacactgtgctagacttctagtgcaccaccacttgggctgctgctgacgccnntcatctcgtccngcttagctgtcaggaangctagcccgattatggggcatcnatgcngaggacctnttgacataaaacgtggtttaaaatttttttcttccatatttactacccttcatttttgggttgggatgaacccctggctttttaaaaatttaaacttaccccggtgtcttttaaaaaaaaaccggggggggttctttttttttttaaaccccctttttttggaactttttttttttttttttttttaatccccgagtttgggggccccacaattgggggttttttttccccccgggggtttttaaaagggcgggggggaaccattttcccccaaaaaaatttttttttggggaaaaaaatattttctttctttttttcgggccccccaccaaaaaaaaggggggnggggggggggggcgccccccttttttttttttattaaaaaaaaaaaaaaaaaaaaattttttttttttttttttt

SEQ ID NO: 51322 - DNA, 2553 bp, Oryza sativa
gatgctgcagcggaggatcattcagggcgagctgatccgcgcgcaaaggacgggcggccagcggccgtcttcgcccccctcgctggccaacgcctttttccctctccgcgcacgctcgccggccggcgaggaaagatgctgggtggggagagaggaggcgtcggtcgctccctctcccatcgtccactcgtccgtggatagagatgatggtgggtcccactcttttttctttggtctaactgacatgtgggccccacattttgtttttatttttatattttgcttccaatgccatgtcaccgccacgtaagatgaggaccaagtcaaaccggccacgtaggcgccacatcagccaaaaccaccatcaaaaccactgagggacctgttttgcaccggttttgatagttgagggaccattgtatctggtttttcggttgaaggacgaaaatcggattcgttgataagttaagggacctcaagtgcacttattccaagttgacttatatagctcactatgtaggagtatttgtggccatgtcaccattgaggagagagataagacaaaaaagagtgaacggtggttagtcgaccggcatctacaaattctacacaataataatattctttaaactttattctgatgtaatcctacgaggagatcgaatagtttatcactatatttcaaccaataggcatctacagattccacataataactcttttttaaattttattgttgaggtaatcccacgatgagattgaatagtttatcactatatttcaaccatatataagacaatgcattattttcaagagcttttctccccattggaagggatatacacctccctgtcattttaggatgtgaaaattttaaaccggttgaatgtttataacagtgaatgattgataatatcaaggcttttgttatccttatcaggtatagatatatatatatgtatatatatatatatgtatatatatatgtatatatatatatatatatacatatatatatatatacacacacatcatgctgttaggttggagatatataggagtaggaaaatgctacacacacgactacggcgtccgactgtcgtacgaccacggcgtaagcgacgtgatctattcagctccggtgtgattctccatctcgttgcgccttccaaaagcccaagtcaaagctaagcagctaaatagacgtttgctttgcatatcttatgaaacagtgatcaaacttggttgtagtcttgtgatttcaatcagagaactaaacagaatatttgcatgttttatttttatttaagaattagaaactatgcttgtggttttggacatcactgcatttatattttgtttaatgcaacctgttatagccataaaaatagaacttgaaactatggtatatactctctccgtttcatattacaagttaaactactttgacattgatcaaagttaaactactttaaatttaactaagtttatagataaatatagtaatatttacaatatcttgggatgaaaatgttactatttttttacaaatttgatcaaacttcaagcagtttaactttgatcaaagtcaaaacttcttataacctgaaacgggggagtatattaagagggttaaaaaaaaacttgtctggaaaatgggcatctgcagctgtgaaaacattacaagagaatgttagatagagatcgaagttagcaggcagtgattgagatcgaccaaaactccggcagaacagttgtgtagccatgtccaccatgttaatgctgtcttcctgagtttgggcttagagtctagacttgtatatgggcttgcatggcattggaccgattcatatacagagagtcgtctcacgccgtcacgttgttcgttgttgccgtttcagcgttcgttgttgccgtttcagtcgtatggtagtcggatgatttgcgtcggacgtatagcagggttgataggagtatatgttttttcgggaatatgcaaaaggctttatagttcctcggttttctgttctttgtttttcctatatgtagttctacaatcttcttagtatgtttatacatccggctaacactttgttaatttataaaaactcctggctaacactcaatacttgtatttttctactacaagagaaaaattaaacggcatatatatgtattttaagataatgctactaaacagcatatacgaagttgaaatgctaatctttctaccatacctatcaaattagttttggtgccaaataatgtctcatattgtagttccctgaatacttcgatgatagaagaggccttctactccctctgtcacattgtaagcgtaaccatgagtttatgtgtctaactttaatcgttcatcttatttaaaaaagaatcatcatcatcatcattattattagacgataaaacgtgaatattattttatctgtaatttatgtttttaatttttttaaaaaaaatagataagatggacgatcaaagttggacacagaaacttatggctgcgtttaaaatgagaccaaaggagtatttggg

SEQ ID NO: 51323 - DNA, 906 bp, Oryza sativa
aaatatatattaataataagatcatacatattcatagcatagctgatcaaatagatctggcatttatcggctaatactccgacactactttatattaagatattaaagcaaatagaatatactaaactgtcacgtcctgataaattcatcccaaaataaaaatcatcttctaaaaggaataatagaattaattaaaattcgaaaagaaattggcaaacattaaaatacgtacaagaaaaattcaaatgtgacccggagaatttttgttaaattctccttggtctaaaaggagccctcaaattttagtggaattttcagagcacaaataataattgaaaagaaataaacaaagtgaaaaggttttataaaaagaaaatcctaaaagaagtctgtttcccccccttttttccctcttgggccggctcggcccattccctccctctccctctctctctctctcctcccccgcggcccatcggcctcccccgtgcgcgcgccgctgacaggcgggcccgcccgccgctctcgctgacgggtggggcccacctgtcatccccaaccccgcgccgcgcccgccgccgcgtccgtgccctagcgccgccgccgccgcgaatcccgccgctcccgtccaccccgcgtgcaatcaagaggggggaattaatccccgcgttcccctcccccgtttccccctctttcccctctctctctccctcggattcgttcgaatcaagcccgtaatcatcgccggcgcaatcaatggcggccgaaatctccgcggccggtttccttcctccccggccgccttctctcccttccgacgctataaaaacgttgcccgagctccgctctttcgtttccgccgctcgccgctcactctcgccgtcgaaatcgtgctcgcgccgtgct

SEQ ID NO: 51324 - DNA, 1242 bp, Oryza sativa
aggaaaaaaataaaatatctaaccattgattttcatttaatctgggggacccatattttccaaccattacatctaactaaaaaaataccaaatagatttatatttagaaagcaccacgttctatatcgatccatccgtacgtgtacgtgcatgtacgtatataattcgtacgtacgtgtccccccttcccttcttttcttttttttctttttttcactcatgagagataaaaaccaaattaataatttcagctaatagttgtaaaaaaatacaatgttatttcaagttgtattctacgcacaagtccattaaacttcctacgaatgcactttagtcaccacgtgacatcctatatactctcctaagctgtcatgtcgcactctaataaattagaaaaaatctttgaaattatgagaaaaaagaaaaaaaaatctgaccatccgttataacttataaaccgatgaatctattatttcgaacaattagatatatctcaatgaatctattatttctaacaattagatatatctcaaggatctgttttcaataaaaaagaaatctcctctctctatatatacgtactcctctctctgtggtaagtacgtgaatttcctactttattgctagcaaccccatataaaatcttaagttactaaattatactcactctgtccctaaatatttaacaacgttgatttttttaaatatgtttgaccgttcgtcttattcaaaaatttttatgaaatatgtaaaactatatatatacatagaattcaaatgataggaaaagaattaataattacttaaatttttttaataagacgaatggtcaaagatgacttaaaaaaggtcaacggcgtcaaacattttgaaatggagggagtataataaaccataaagatgcagagaaatcaaaacgttgaatatgttttcaacgtgcgtgctgcttgctttaatgtggttatccaaatagactaacctattcttgctagggattatcaatgcaattagcattaggtctgctacaaatgagggtgtgcacatgttttcatcctgctaagctctactagatttatcttaatcatcaatttgcgaacatatttaaatttagatccatggtgtctttaaaatacttaatgattcaaccgtggtaaacttctacggaaaagaataatttctagggcatgtcatcccaattaccatttaaaaataaaaaaaattatatactaaagggggctgcag

SEQ ID NO: 51325 - DNA, 1077 bp, Oryza sativa
aagacgggatctgtatgtcaacaattgtcgtttgtgtaccctggctggtcctggacagggatttaatgcacattcagcttagaaattttggttcgagaatttctgggcgtgacaagttggtatcagagccgaccttgaccgtaggacaagccaactggaaacctaagagcctctgaacccctttttcatctgcatatgcctttttgcacctggaattgtttcgggaaaatttggagttttgcctctttggtttgcgggaaaaatcttggtcgttctttcggatcggattttttttttttaaaaaaaaaaaatattagctcagtctagggctttagaaaaattttagttggagtttattcgacagtcagtcgggaatttattgggggttatgcattaggtcgtgtctatattcgatgggggcaatgttatgcgcatcgttttccatgcaactagtctatgcattaatttattgtttagttgcattagtgtctttatttgagttcatgaaaaatgttctatgcataaaaatcatcatgctcggttatttatttgagttttcttttgctttgtttaatttgggtttgagcatgaattggttcctatcccttgtctactttagatgtcagtcctatccctcgtttgcaaagcgccgcctcgagcttcagagtcgccgcccttagctttatcgtcttcttagtctggttgcttgctagttttcgtgtttaggtttgttgcttgtgggctagtcggcggccgatatcatgtgtcagtggtatgactgcctcaattaggagttgcgtgcctctttttcagtgttttaatcaagattaagataattgcacttaaattcataagcaagattagtttctgagcccctgtttttcttccttttctcatatttctacctatccccttcagatggagataaggaatggttcacgcgactcgaacaacgccagtggcagcgaagagccgatcaatggagcacgtgccaacggtgcatcttacaacagtccgtccccaccgcccgagaacccaacaattgctcaggtgttggacaatcagactcagatgatg

SEQ ID NO: 51326 - DNA, 672 bp, Oryza sativa
aaagctgtgccatgaaaacatcatgtgtgcagcgttggagtagtagggcttcttacaagtaaccaaccacagcattgttggcggttcttaaatgccgattctataccaccaacatctgcttaaagatcagacaataaaacatccaacatagtgataggtgcttaatctcacgtatttcacaagtgttgatatatatttgtatgcagatgataaactctgatgttgggaggaaatctagactaaagtgaggagaattctgtatccatacaaggatgggctgtgaacttcatcgaaacatcaataaattagcccaaaataccaaaaaatggataaaggagaaccaggggaggacatgggccaaaggccaggccagatggacctagcgagcttgtgaatcctctctatcctggactatcatttgcttggtgtccttggatgaaccaaaggaacctctcatcacacatgttcccttggattcgatacccttggaatactccgtaggggaagtgctacattggtatatccatgcgcttgcggattttatctgtaactattcaaatactaacaggcatggtgcacacgctgctgcacgagcatcatgatgcttgggtgaccagccatgtgcctgaaccgtgcggcgaagacataatgcacacaacatcaaagaagctg

SEQ ID NO: 51327 - DNA, 657 bp, Oryza sativa
cggaacgcctctctctccgtgcgccaatgagtttcgctgcccttcctatctctggccggccacgctagccgccgtgggcttcctcccaaccactaactcctctctattttcctccgtaggtgcaaccgccgcccgtctgcccctccgctcgtcgggtcgtcgccgccgccttcatccttcgcgccggccgccgtgcccgccggtgaaaactccttctcctccctctttccctctctcctgtgtgcgccgctgtcctccgcatgcgtggcgtcgccttcggccgccaccgctgcttttcgcaccacccaccgccgcttctcgcgccggttgccgtcgccggcaaccacccgccaccaccgcatcgccatcatcgggcggccgacttgaagccgagccgagcaaagccggtgccacctcctcactcatgagccactgcccagtgggccctgtctaccagtacccactacctcacccttgtgcctctgacccgtgggtcccgcacgtcggcgccgcccccctccttgatgatgtcagccttgggatgagttattgcgctataaattgattaagggttattcttttataagaaaaacacagataatcgttctaaaatgcatatctaattcatgccagctccgattacagccattcaagtct

SEQ ID NO: 51328 - DNA, 578 bp, Oryza sativa
tgtcacaaatctaacacaaactaaacggatactcaactctcatcaaatctattgagctccaaatgtggcacatttcatcatagctgaccgaactattacatcttactccaggttttatgtctcacatgcaagtgtggcgcagtagttttcaacaaacaaccatcctaccccttactagctccttgggttttgggtcttcccatggctccatgtccgcgatctttgtcgccatggagggcaccgctattgaagtagtttttcacccttgttccagccaatatttttttcctcagctccatccactagtggctttgaaattgttaggcaaactttttggcaagttaccaaaaaaaaatatatggctagctagctagctagttcgataggtttcctcatgttgccgccactgctatacgtcgaatgatttggctgtgcagtcacaacgatattattttttcaaccaaaatgattacatttatatgcagaacatataagcttccttgctagtcatgtctatataagcacatatatattatatattttttagcggaaatttagttatcttttagtatctttca

SEQ ID NO: 51329 - DNA, 1847 bp, Oryza sativa
ctccggtgctaggtacttcggctattcgatgcaagggtcaaccactctaactataagttatacttcccaagagaaccaatttatcccgcttgacatgctttgacgtcttcccgaatgacgttgctgctggacttgttattgtctgatcgtgatcctgccagatctgaagcttcgttgttagaggtgattttaatctgacctttgtagactatcttcgaacatatcactggttctataactgggaatggctctcacgaacaagcagctcggattcactttctttacattcagtttacttcccattattatcttcaggttgtcctcagttagcattcaacgtattcctttacacctttaaacttgacgtgttctttcccattggatcatctcccaggacatggcgttgcctggtaaccggtgcttgcatttttcactccgtgtagcatctgataccgagtggaagatttcactctttgccttcatagaaacacttttacctaggtcatcttgcttacttaatgacaaggtgactgttgcggggcaattacactcaggggtcttccgtgagcgatgcagagcatgtttctgtttatcaatcacctttcggcctacttctttcatgctagagaacatctttgccaatctcttttatcaatcttctttcggcttatctctaacaggtggtattctttaatgtggattgcggacgcttctggggatgatgaggtcctttggcttgctgcctttcagtgaaaccttgatgtggttcgtcaaaagctgcactgactaccttcagggaaatacattgcctgctatctgtatctataccactagggtttaattgccatcagccgatggtcatctttagtgcttcctcgagatggggagcatccaaattgttcttctgccacatcacctttgacctttttctgataccagataaactaattaccaaccatcgactattatgttctcaaatattgatgtctcctggatcttcttaactgttggcaggtatatccgatcttatcaatgtagaggcatggcgggtacccttaggggtttcctccaacaatccttatcttgatctgtaaaaggcgtatccaaactcctatcctcaactactgtctcgttggctttttaacccaacacagtttaattgtttttcttttccatccacaggttggttattaactcggggttagaatatagttcctctgacacgagaccctaggtctcctttgtcagtaaacaattatacacatgatcacatatccgcatctttcaaacgaatcctcatggaacttgtctgtattacacatttctcccttattacatgaattcgaggcactgccttaaacaaaaagggacggtgcttaacatcggtacattgtatcctcaacaggaatcatccataaacatagcaagctcactgttttatagacatgaatatatttttttattacatgattgctgtagactcccggttacagtgataagtagctaactgaaaatcacaaacatggatactcattctgattctggagagatatagctggcgtggttctagtgactgcattatccttgattggttctgtgatgatgtgataggactgcatattgctatcattcacaggagaagcttccttctgattgctggttgaagcggatgacggtcttctgcttggtatcgccctttgcttggcctggagtaggtcggggagagacacaacttcttccatcgacgacaattctttgctggggctgaaagtgagcattgaccccttgtggtaatgcactcgctggagttggagctggtgcaacgcgagccataggactgctttggg

SEQ ID NO: 51330 - DNA, 681 bp, Oryza sativa
ttcctgcagccacctaacttaaaatatatctcaataccaccggttagtccacaattagcacttgtcattaattaccaaaattaacaacggaggcctagatgcttcactgtcaaggaggacgaggctggcaaggaccaaatccatcgtcactatcaccatcttcgtctgccgaagagactaaagaggggcttggagaaaaaggggagaaatatgaggaagaagaaagggttacagaggctgacatatgggtcccactatcataaactcagaatagtgagggtgaatggagaggctattggagtaaacaataagtttaacttgcaaaattagatagagagttagccaaataaatatttagagtcaaatttggagagactgttggagagtagtattggctcacatggcacattaaccatgatagggtgaatgaagaggctattggagtaaacaacgaatttgacttgccaaattagatagagagttggccaaataggcattttgagagtggtattacttgacgtagcacattgaccatggtcaaaagcactaagtcagccaaaaagttaggaatatttcgtggaaccgacatatgtcatcctcactctccctcacttggtcatccttctctctcctgtctctctcctccctttttccctttggcagtgacgagggagcttgggc

SEQ ID NO: 51331 - DNA, 739 bp, Oryza sativa
gtagtagatccatggccagctaaacttttaaacgctactcgaaactgaaacctgtcaatgaaaatgcagggtaagttaaaagtttgagcatcatctgcagcaattacaatgttcagttacttgaaaaaaaattaaatactagagcataccacacaatgagttaatttcagaaatcccatgctcagcaatttgtttcatataacccaatggtttaaaggcttttttttttaaaaaaaaaacagcatatctatgaatgtgcatgtgtattactcctacatataaacaagataactcaaggaggtgaccaaatgcaaaatcaactaacatactactatgaaggtaagcacttcactggccattcatgtgaatgcagttagcctgagtatatgaggtaagccaccaaaaaagattggacaaaaaaaaatattaaaagcagaaagacagacaatccttctattgttcaaactaataatcaacgagccaattatcagaacaagtcaaatattttaaactatttgacagatcaatatgtaaatgcacttcatgataagtaaacctcatatagctttaggcgtaccatctgccaacataatggaatagaatgatttccccactcccaccaaatacagtgcaggattttcaatagcttttcaatagaactcctatatcttgattttctatcaaatcaggaatgcaactagctttgggggatcccctagttatataaagaccgcccccc

SEQ ID NO: 51332 - DNA, 712 bp, Oryza sativa
agtgcattcctcctatcaaccaacaattgagtttcatgtgccttttgtattgcatgtatgcaatcatggtcatatggtttctctgaatccttgaatcccagtgtcattgcacttttcaaatttcaaaacttcagttcaaataagcaaaagatcagataatttggtttctagtttctactgctacagtgcttcaagcatacaaaaacagaggtcagaggttacatgggatcactaggccaagagtgatgtactgcgaccaacaatttttcttttatgaataaaaatgcttttaagactgccaatcaagaatattgtgatcaagagttataaatattgatatataagctccatgaattagaagttataaagttggggcgtttactacttatttgctattgaaatggtatctttgagttatatgggtcatttactacatatgattctttttttctggcccaatttggtttggcacattggagctgctctgggagaagcatgctagaaaatgcggacttacttgtgttgggataatttggctcatggaatcatctatttgattatacattaaccatgtgttttttggtcttaaacaagtctgaaaaggctcgacaagaaatgcattcttggttcaagaatggtatattcatggtacaagaatccgtcaatcctaacccaagagcatatgattagtttaaaaaaatgatgtatacta

SEQ ID NO: 51333 - DNA, 1244 bp, Oryza sativa
cgtccttcaacagcaggaaaccaaccatgtgcaagaaatgggaagaagaagaagatgaacagcagacaggtcgggtagctctgaccagctgctgcagtttcgtgtatatggggctggtggccggcgccaccgggaccaacaccatcgagcaatggcggttggctcggactaggtgctgcggcatccagatccgatgagcctgaacccaacgccatctttggcacagccgactcgagccagcctgtcccaatcggcaaccccttgcactgaacttgcagcaagaattgagagaaagaagatgtacaggagagatggaaggacaccaaggaagaagaagagggcattttggtctaagaattttgttaaacacattgaaggggtatgtagtggtatattttcaatacctggaaaattgtaatggcatagctcttaatagttgaatggtaatggcatatgtcagaactgaaaaaatgctgtgaaagggtatatagcggcatatctctaacacttgtaaaattgtaatggcatgatttcaaatagatgaataataatggtatatttccaaactgcgaaatttacagtggcatagatccaattaacccaccatatatattccacaattccaaatgttcattccataagttttaacttcagtacatgtctagtatttcgaacaggtcacttgtttaaccgtttactgatgtgtatacaaatttgtaattctagacagtttatctattctcttgactggtactgttgtatcagcctttattaatagatcgcataactggatgccgccagcaccaatgttctgtcagacagggtaaaaaatatatcacatgattacagccatacggagtatatatttttatttaaacaagtacaactcttttttactgcatacctggctttcagtgtagggatccgaaaatgttatcactttgaactgcagtatatcctcaaatatggtgggtactggataggttcatctcatatagccttggagatctagataacatagatcattctggagttaattactccccggcattcttcttgaaattgatgatatatttcctaaacttttgtgtgtgtgtgtgcgggaacttcaaaggactcaacgagctgaaacagttgattgaagaacctttgtaccgatactttgattcatatgcgacagagtttaataatgcttacattttatcgtatggacattttctcgtgcaatatgtatgctcattatt

SEQ ID NO: 51334 - DNA, 1409 bp, Oryza sativa
ttcctgcagcccatgccattgaaaacgaagctagagatccattatggaacagcaatgccagatcaacgagaattataaatttggatcatgttgtttcagaggaatcccaattgcgatacaaatcagacacaagtatttcgggcgggacctgtgctttggaagagcgtgtgtggagctgatcagtatattgggtatttagatgttctaattcattgactcttttggttcgatctcccttggttataacgaaacattcttttttttttacttttggcatagaaagataatttgcgccaaaattgaaggatacaacattatggctactcccaaggatgtggttaaagttgaaaaaggttaattttattggttattcctgagaacatgaaagatttgtattttatttatgtagcctaaaaaggtaaatctgaatttctaatttaatgtggtactgcaatccaccatttgatttatatagctagccatgctaaaaaaaactgccataattgtctctgcagctacaagtatatgcagatacgctgggatggagtgagcataatggaagaacaataggcctttatttgatggcttttagctttaagatgctcaatgaggagggccaaggagattttgttcttttatttgccattgattggccttcggttgatatatctgagttcatgtactccacaggcacgaaaaaaaggtaatatccatatatgcaggattatttctttactttaggtttttactattttactatgattagacaaggataaatggatatattttatagtatgaacctattagataagctcagcttagtgtatgcagaggtacaagcatgaaacaactgattctgaataggaattactactccccttttctagtctacgaatttgagtgggtaccttttcattagcaaggcttaaatgctcccaactggtagttgtttatgaattgatagaattttggtgatttttggtgaaatatattctccaaagaggtaaaccttattttagataaagaagatattttattttgaagcagaagatgtgctatatccccaacctctacgccaggggcacgcgacacgaccaaaacacattccatgatgctctataagtctataactactacaacatacataatttcatttttatatcgagcactactatagcatacataattttcatttttatatcggcattgatctaggattatcctgccattgctcacaagctactaacaggtagtctttttattttcttctttgcaagaggaggcaaccttaatatatacctggtggcacctctgaccacaggtttggaggatggaattaggcacaatgtgatgcatatgacttcagtggagcaattttatcaggattgctggtttggaggatggcatta

SEQ ID NO: 51335 - DNA, 792 bp, Oryza sativa
gtaacttggttctacgcgccatatcccatcaaatatccaaccacattcttcacatacaaaacactgtaaatagaaaatttcagcactacagtgtttccttcacagcagagctgatatttttgtcacaactttcatttcctatttgttcaggggtgaatggattgagatcattaataaaaacaaaattagatgtaactaaaatacctactagttgatgaggacatcaataccacgatacatccacgtctacacaagtacaacttcatggtcttattaccctcactcgtaaacgtcaactcaactatcatgtgagttcattcgtgacttcatgttcatcttatttgtaccctagagacgtgtgcactcttgttttacataggaatgatggagaggatcaaaatgggagaggatttacgcaggctagatttgagatgcagactccggtttgggcacgcagatacttcatggaaagtttatcaagtctacttttaaatggatccgtcctcatgtccatatttgttctagagagaccacaatcattgttttactacatagatctttttctgtccatggtgctgcatcaccttatttgggcccatgggctgtgtatcaactcgagtccattaggggcgtatcttagggttggaagacgaccccaactcgtcctcccacctatatatttcccttatccgccatagatcaactcgggttttgtttagatcaaagtttagcttcgctattctgccgtgtaatcctgtgatcggttagatcgtcggtttgctcattacggaa

SEQ ID NO: 51336 - DNA, 656 bp, Oryza sativa
atacacgaaattaggagaaccaaataatttcatttatgcctgttttgatgagtttttctagttctcagtcctatccttcacttgccatcaaacccagcagcagtggcggctatgacgacaagacatgaatataaacaacaagtgaaatcctaggcagcggtggacacaaactatggtggcatgctatgtgtataaggtgctcatgtggataattagatggctaaatgattcacttaactcaaattagtgacctagatttgcattttgaaagtagagtaacctatatgacacaactaaataagtcggatgaccctccatgcacttatctttattatgtctgaaaagaacataacgaaacaataatacaaattcatgaccaaacaagtctatatatggaaaactatgtgttacacattttttaaaaaaggaacaatttactgtaacaaatgctttcataactgaacttatcacactttaaaaaaacatgagcctagttcagaatttagaacctcaagctgcaattagaactaacgatgaaatgttagaataaaaggtgctatatcatattaagtgtgccatgtacagatatactccatcatacaagtacatagtttatttcagattgagatgaccaaatgtatacagcattcatgatc

SEQ ID NO: 51337 - DNA, 3252 bp, Oryza sativa
tagtggcaggtttacattgaagatgaatatatgtctatgtatatataccactttgagaattattataagaactaatatgaaagaaaaatcttactatcaatcttaatttgcattgatatatatcccagggtgaaaatttggcatggagatgtcaagtgctatttgttatgtatatctatatatcaaggcccagcctatatattaggcccatatagtccctgaggactctatatatattgtcatccagagagaaaaggattgtattgattctaatccccaaggtaagtaatatggtatcagagccatggattagggttaggtttgtaatcatctcctacccacgatccatcctgctcatcacggcaccatctcaccactgtcaagcctccttccggtcatcatcgaggctttgcatcctctgcatcatcctcacgtttgggagcccaacctctggtcttcatctaggaacacgctctgcaatctgctctggactgaggactgctctggtttggatttaattggtaactggtatctttcttgtttggcggctgcggcggctattattactactatactacatcttgcacctcatcgctgcatttattattattatccttcatggtcacaacaataatgagtggtctttttgtgtagagactagctttgaggggtgatggttgaccttttcatttaaccgacgatccacctgcgcctaaaactggtgataaaactaatgatactaatgcagctgaaattaaaagttggaaaattaatgatggtaaagtgatggctgccatttttaatagtgttaagcactccttgattatgagtctgtccaagtttcaaacagccaaggctatatggggttctctgaagcaacgttatgttcaagatagtggtgctcttttgcatactctcatgcagcagactcatgccattgagcaaaatggtatgtccattgatgagtactactctgcatttgatcatcttattgacttcaatggtgcctacctatacaactgctgcatgtccagcacaccaatttcttgaaaagtttcttacatattgctttgttatgggagtaagagaagattttgactttatccgtactcggctgcttcacagttcctctactctaaccatggcacaggcattgtctgatttacttgctgaggagacacgcctcaaatctctacctgcaccatctgtgtcagtttctcatggtgtgttagcagcttctcagaggtttggcgcatccagaggtacctcttcaatgccttgtaagcattgtggaaagacaggacatagtgcagagaattgttttgctcaacacccagagaagttggctgagtataactacaacaaaaccactgttataagacatttgacttaagacactctgtaagttgtctcaactttgagaattacgattaaaatagaggcgacttttgagacgctttacaagttggagacatagtttaagacactttacgattagcataagactacatcgtttagatatgaatattgagacgttttcagacgtctcatttctaagatgtgtttagatatgaatactgagacattttcagacgtctcatttctgagatgagtttagatatgaattttgagacatattatatgcatgtcattgacatcaaacaatacaattattatttacacagaaaaaaagaatatttgaatcatttagattccatcggaaaactacataattccttatcatcttcatcacataatattataattatttaatcatttaaatcatgagggtttccgagactaaaataatattataataatttttgaatcattcagactcaataaagtctctctcaaatgattaatattataatattatttgaatcatttggactgcattgaaaaacatgaaaaataatgtactcgtccacagaacgtacagattgcgataatggggcactaacaagattaacgtgaataattaagcagcaagaatgtgcttctttgttagataggataattacaaacatatacacgtacttggttgatagaagtgggctggacatgctgcaaaccactttatttgttgggcgcacgatttgctttgttgggtgcgtatttgtgagaattcttggacgatagtctccgcaacaacatcctgaacaataaccctcgtgaacaatccccttggtggcggcgacacaactcacgccaacagattgcgcctccgcatctcgcagcgcctcctccgtcgtcgggtgcggggttccgccgccgctcgcgacctgaggggcagggcctccaccggcagccgtgggcataggacctcctccgttcggcagttcaccaacaggtacagcttctccgccggctggcaagcccaacgcatacaatccattactccatcatcaccattcagcagccatttggtccttttcccttttaagtctttatttggattgggttttgttatgtgttttcccttgtcatttagatccgatgaattttagaattaaaatcttaatcgcttatctagcactagtagtactgctagtgcggctatactggtgcagattcatcagggtcactagtgaccaagcattggagtacattatccctgagaggcttgtgagcttgaatgcttgatagtactaacagattttggtgcatggaacctgtctgggatgtacgacttccagccacatcgctgactatgaatgcaaacaacccttaaacttatatagctattgaattgaacttgatatgcagaacaagtattattctaattatctctagtgatgtgatgtcatttggctaactctatttacattacatgcttacatatattttatgcattatgttttcgctctgtattttttattttttaaaatatatatagacgtatccccgtatcggtgtttttaagaaaatgacgtatcctcgtatccccgtaccgcgtatccgtatccgtattcgtatccccgtatcaaggtaacatagatattacgtagaaccaagttaagacaacttacgagagagtggatccacgcatcttatgaaattttgctgtgaaggtggttctgaatgctagatatcagttcccaaaagatgaaactacctttcaccagtggtattttaaattatggttatgaaatttgttaactattaacatagttatttctatgcgcatcttaatgtccttctcaaatcacccaatcaatttcacattcttttttgtataactcagaattg

SEQ ID NO: 51338 - DNA, 870 bp, Oryza sativa
cattaaaatggagaggtcaccttgtgtttatcctgacaccatattttaacaagaccacgccattgatatccattgacaccttttgggacatattttaatatatcgtttagagtcctcacatcaggattaaagtatcttccctttaaacggcttttgtaagatctccaccctttatcagctttcattagaatccagtctcttgtaagctgcttcgtctcagaagggtacacaaatttcatctttaccatgaataactaaaagttagatctgaaataagcatgataatatttgtttacattaattaaaaattcacctccacgtcagcgactatgctctcctttggtcccacaaataagtcatggtcccattttggaatgtccaatggtgcaaatgttgaattctgtgcaagcttaccaagatacgagcctagaacagaacctgatctatcatttggaataccatgttcatccgtctctacaattacctttccttgcttcagttggtccaagttttttacattaaaatttcctagaacccgtcgtacctccccatttggccctacatttaggaacagttcagctatgggtgataggaaaaatcatatatatagacatatataggaagaacagattatattaattggtcttttggctgcaagaggcaactccgtgattatgtcatcattctctgaaaggtcttgctcactatcttctgtgggttgtacattccctgcatcttgagcttcgagatgcaaattatcgtcattgaattgtgcatctgcttcatctagagcttcaaagttgtacagcaaattttcttcttcagcttgcacatgtcctgcgctctgtgcatctaggttcaacttccgta

SEQ ID NO: 51339 - DNA, 923 bp, Oryza sativa
tgattgcctgaaattaaggagagaaggcgatgtactaacctagatcgattcaatgcgcaacaaagaaacagcaagaagaatcagcagaggttaattgacccacctgtgtgcaaggaagaacggaggaacagcactgccgggcgccggcggcgggcagccgtcgtgtgcaaggaagaacggaggaacagcaccgccgggtgccggcggcgggcagccgtcgccagattgggttttccaattctgttacaggagagtactatggagatggagaggtttagggatgtggcgtggaaaagtaggtccgtgatatatatacagtaagctttccaaaaaaaaaatgccgccaaaaaaatcagcctaggcggcaaaacaaaatatatttaggaacggcagtcgatatatataccgcgaacgcttcgaaaaatatgccgccaaaagaaatccgccttaggcggcaaaacaggaacgctactactactactacacgtatctttacaaacatacgtgtagagaatctcaatacttgttgtggtctattggttaacaggtgtttttctgtgacatacatacattgttcgagctcaaaagttcgttgtatttttgctttttttactttgagctggatttgcatgactttgcttgagattttttttaaaaaaatagtaaataattttgtatgttcatctcagatatttttaaatatattcatgtcagattaacaatctgaaaatatatttttatttaatctgggtttgcatgactttgcttcagaattttttagtattaataaattaaagtccctgtccatctcagatgaataattccaaaatatattttctctaatctggatttgcataagttggcttgagattttttttggaattagcaaataatagtttgtattcggaattggtcaggggcgg

SEQ ID NO: 51340 - DNA, 792 bp, Oryza sativa
  unsure (1)..(792): unsure at all n locations
cggctgcntatgtatgctggtgcaccgcccggcggncgatcttaactagtggatcccccatcaagcatatagccactagctcaaaaccctatacaggtctggtggtatcggattccgtaggaattactctcatctgctatggggcccatcagctcatccgattctttatatgaatatctcgacacttgcaagatcaaacccaagcccgcatctcatcaaccttaagacctacatcggagctaataaaatcgcccaggacgtcgagttcgtcgacttagttcgcgccaccacagttcctgtaccatgggccaaacgcggatacctcgtcatactgtgtcttactccacaaacagggacctgcatgtgctgactactacagaactgtcatgacaagggtgagcctagtaaacatggttgcggagatcatggtccagcctctatattatcctgcccatcatcacgtaagcggccctataacacgcatgcttgaaggggccacctattgctatcaccaccatcgcctgtagaacggtatgaatgttttaaacctccaagtgaacctatcctgccaactcgacatacgtccgactggtagaactactactgatgccgtaccggaagaaaggtgatgacctatagtctctaatctagtccatgcagcttaaaatagatcgactgttgggtgttgacgacaagaaaatacccttactctcctcacactgatgaatctagcagttaaaggcaaaccaatgatgtagacctccaagaacaatttattcttgagtcgaagac

SEQ ID NO: 51341 - DNA, 720 bp, Oryza sativa
gcgcatcggcctcggggccgcttgcgcgtgcccgaccgccttggcgcgtcgtcgcccgtccgacgccctcagaccgccgccgccgcacaaatcttgacgacgacaaagccaggacgacgacagccgcaagaaatcgccgctcgacgccatgcgcgcccgtccaaagccgccgcgaagtccgattttgattctacccatggtgaatcacgccaattcttgccgcacggttggattgaagatagacggtggtatcccctctcacaattcaaaccattcacccccgagtcggccgttttcaccctcgccgccactgcgcatcgcgcccggattggcgccaacacgtcgccagccgatttcgcacgcggtcaagccaatccttcgctggtaagtattcaaacgtggcctcccgccactcaaattgatcttgcccgtcctctcacagcctctgccgccccagccatatccaatccttgagctcatccatggcgatgacggtgtccgagctcatccgttcctcctagccctataaataggaccccaatcccttccttgtccatcatcgatcatcaacaaccatagccccacaaccccgagctttgattcaccaatcgcccgtcggtcgaacaccttgtgcgcgatcgactccacatccctccatccatcttccgccctaaataccccttagaacaccttatatcaactatgttatagtatattaga

SEQ ID NO: 51342 - DNA, 670 bp, Oryza sativa
aaaatcaactgcaaaaacaacagcctctccttgaagcctgcattaaacacttaatttcccatggcttgctgagtactcccgtactcacccttgctctatataaataatccccccccagttgctgaagaagacgaagcagatcccgctgatgaggagttcttccaggagcaagccggttacgatgagttttagggtttcggcctagttcccaagtcgcgcctgtgatgtttggtcctagtcctggcttccgctttccttttgtaatgcagttgtgagctcggggtctgtccgtagcccaatatgactgtacctctactctataataaagagacctctgttgctgtgataatctgtcttcctgtgataccagcactgtttcctgggactagtatcgattaacaggttaatttggagcgtcacgggctagttccggtcggtactagttcggggcgtgacactaactaaccaaattagcgtttaccattttcaataccacaatgaaatctatctatctattataggaatgtaactgaaattcggaattaaaaacaagaaatattgatagaagagtacatataagaagccaatatgagattaattaaaattcagaataaaaataaaataaaatccacaactagaatagaaataaaagaaaagttcacataggaat

SEQ ID NO: 51343 - DNA, 620 bp, Oryza sativa
aaatatgcagcaataaagatgaagagccggcaaaaagaaagtcttgaaaaaatgtctcaaatcaaactttaaagctctgaacatcaatatcttataaacatctagctatggtcagtgaaaatatggatgacatgttagaaatctagttattatttagcatattttaatccaaaaattatagcataataaatatgactaataaatatgacatgtatgcaggcgagtgatccaaagctggtgctaacattaacatgctaacagagacaatagcatctagacatatgtttaacaccagagtgaggagaacatacccgcagaacgctctggattcagaggttgtggtgttgatgttgtcgttcccgattgagccgttgccgttccctccattgctattcctgtcgcagttgtcgttgacgtcgttttcgatactgatcgacatgatccggaggttgatgtagaggaagcatatatgacttgatgccgaggaagtagtgctgatgtgaagcagaggaagaagtagagcagtcgcgcgaagaacacgctcccaaaaattttatcgcccacctaaccgtgcatgtactctggtggacggaattcttgaggtctactcgtcccaaata

SEQ ID NO: 51344 - DNA, 725 bp, Oryza sativa
ctctacttttaattttattatgtttattccaaattttagttagtttgaaattcctatatggactctatactctacttctaatattccttatttttttaattccgaatttctatttttttttctaaattgtatttctatatatactctatactttacttctaatattccttatttttaattccgaatttatattatttcctaattgtatttctatatgtactctatattctacttctaatattccttatttttaattccgaatttcagttatttcctaattgtatttctatatgaactctatactctacttctaatatttcttttttttaattctgaatttcagttatttcctaattgtatttctatatggactctagtctcctcttctaatattcctttttttcattccgaatttcagttatttcctaattgtatttctatatagacagactctagtctcctcttctaatattcctttttttaattctgaatttcaactatttctaaattgtatttctatatggactctagtctcctcttctaatattccttattttttaattccgaatttcagctatatttaaattgtatttctatatggactctgtcttttctttttctccgattaatgtgagaatttctaggccatgagagcgaacttggaggttcctttttctattcctttaattatatatttaattccaaatttctttctaaattgtatt

SEQ ID NO: 51345 - DNA, 771 bp, Oryza sativa
atccaaaagtttataattgcagaaactttatacttacaaacattctgctttaaacactttatacttcgaaacattataaacacaagaaattagcaggggatggaaacaaaacatgttaattaaaaaaaaaacctatcgggcgattagtaagtttatacaccttgcttggtttaattgatccatggtatcggatagaataccagttaaagagaaacagggaaatagactagtaaaatcattatcacaaaaaaaagtataccttcattttgtttattgcagaatctgaagactgttgtacttcaactctgttactttcagattctgccgagctgttatctttgcctgcagagtgctcaccagtggcatccttgcttggaacataatttgaaattgaacaatttgccttgctacagtccgaatcttcacgagaactaataccatgttcctcaaaatcatccatactgcccgagtcacgtaatggaattttttatctgcgcaacagttacatagacaccttgagctcctgaccaactgatttattagaaatcattgatacaagcagatagtggcaaaggaaatcaaaaaggttatgcaaaaaagcgaaacaatggaattcagaaaagcgcaaaaaaaagatactattcatccaggagattttattctgtccaagatgtctgttctctatgtgatgaaggtactctctccaccccttggttttcagacacatgtatgaagcatttttggtgacttggtgtactgagaattttttat

SEQ ID NO: 51346 - DNA, 675 bp, Oryza sativa
tcctgcagcccttacctcctgaagatcaaatgctgacatgtaatccggacgtcctgactgtaagtgccactatgtttgtttagtatttggttgaatatgaagtttgtgctgctttgtggggtctgatggaaaatccccctttctgcgtcagatggacataactgatgacatggagtttttgtgatagcaactgaaggcctctggtaaattttgaacaaaaaataactgacaataattattatttgatcattttgatgtcactagtactctttgtgatgctgttttctttctcctgctgatgcatatatagtttcatttatagttgcatacctactgtactatgttttttccatgcaggtgcaacatgacaaatcaaaatgtggttgatcacacacatgaccgtcttttggtgagtccttttcttttgctcagtttgtcttcttggcaggacaagagatctcctactgtaatagcaaaaatattttgtgtcaaattctaggaaatgacttcactcaggcaatataaagcatccgattttttaaaaaagaaaaaaacaagtgctaataagtacactgtcatctgctttgtgattgttcgattcttttgttgttaaaactgctgttccttttgccttgatcaatattgctgggactaatatcttgcatgtttacgtca

SEQ ID NO: 51347 - DNA, 705 bp, Oryza sativa
tcgcatatcaggttttgcggttcgaggacgtttttatcccgatgataagttgagggaccttcggtgtactttttcctaaatgtggcaggtaagccagtaagcaacgtgacaaaacttgtgggccgataaacgggcttgtaagctgtaaaacgaattaggatgttaggcttgctcgtcgtgtacaagtctataggaagctgaagagtaggccagctgggcctgacaccaactcaagattacaaatgtcaacgtcaatcatgagtttgcagcgaccttaagcccttgtgagatatagtaataaccgaaatgaaatgggtaaagaaagatgaggaagtgatgaaaaagggaacatgtttctcagggaactccaagcagggcgtacaaaccaagaacatggtgtgacctcattttctgatgagaaaatttcttttatggctcctaaattccagaagatctcttatatatttctgagttttgctcgctcactttatggcctcgaatttggttttgatctacttatgcccatttcaccagttgtctattagctgactaggtaatagctatgaaaaggctaatttgtccatagttatgaaatgaatatagaaatctgtaaagtatattattggaagtgtgcaggagtttgttctatgagactactatatttatgactttgttgtgtggggttttattgagaaacatctaggg

SEQ ID NO: 51348 - DNA, 522 bp, Oryza sativa
aactgaagatttatagtgcagtaagttttttttttctttgagtaacaagtttatagggcagtattacttgcactgtgccaaaacttgcctttctttcggagattttctagaaaaaaaatattatgggtacagcataaaaactgcagagaaaacaccctttgtttcgaatatagtgattacctacgtttagaactgtacattgtcccgtgtaagaggaaactactccctccttctctaaatgtttgacgatgttgacttttttaaacatgtttgaccatttgccttattcaaaaaattttgtgaaatatgtaaaactatatgtatacataaaagtatatttaacaatgaatcaaatggtaggaaaagaattaatagttgcttaaaatatttgaataaaacgaacagtcaaacatgtttaaaaaaatcaacggcgtcaaacatttagagatggagggagcatatgtcagagactctcctctcttttccatctctctccaagctcgccgagcgtgaggtagagct

SEQ ID NO: 51349 - DNA, 606 bp, Oryza sativa
tgtacgtaaagcaagacaaataggctgtgtttagttacgaaaattggaagtttggttgaaattagaatgatgtgacggaaaagttggaagtttgaaggattattttggaactaacatggccatagttaaggcaattttgaatatgtttgtttacaaactttatgaaaacatgtatgcttgaattcaatgtgattgcaacttcctttcatttcaactagtataattaaattttctctaaatcatttcttctttcttttcctttttatctatctgatacaacggtttaaatgtgatccaggtgtcccacgtggaggtccttgcgcatgtctcatctattctcaaggaatttgggttttgccccaaggaagagtacattgacaccatgaacctgtactgatatcacctctgtattcaatgttagtaatgtttagtatgcaaatggatatttggtttgttgataattaactatttcttcaacttgttcttgaaggtctccttataacctggataatttttacagcgtcgtatttcaggaaggtgtgtgtttattatttaagtaactgtttttgagtttcttagaatgaacccttatttttttaatggacc

SEQ ID NO: 51350 - DNA, 536 bp, Oryza sativa
ctgaccgtcaacagtattgatagtcgtcagcaactaactactaatttgccccatatatatatatttatatatatgcttgcacgagggataaccggaaaagaagagtttggtcaaatatgacggcagagggaataaaaatgatggcactagactgtcaaaactaaggaattattcagctatatcgagaggaaaccgagacatgctcgtatctgcaatccgtttaaaaggtgcaacttttgcgtggcaaagatacaaaatacatgtgtgtgctgaaggagatcgagcctttttatcattccatgcatgcatgcgtgaaaggattagaaaatacaccatctgtgcactcccaaagcatgtcgtgagggcaagtattttgcacgtctcttcacattttgtgcagataaaatttcgtaaataaacttataatcaaagtggattcactcataaagagaaaacgtatgcacgctagtcaagactaatcttgaagaagtatttatgcttgccctccgtcctgtaactgaaaacttactggtact

SEQ ID NO: 51351 - DNA, 631 bp, Oryza sativa
ttcctgcagcccccgcagccagcgcgcgtgcccgagccgcgccactcaatctgccgcgcctcccgttgcaagccgcgcgcgcgtgccgagtggccgaccgcctggtcgccgccgtcgtcagcgcctgcccgcgcctgtcgcccgtgtcgccgctccgctccacaccgccccgccgtcatcgccgtcgtcatcgcctcggccccgccactccgcgctcaagtcgccaagggacggaggcagagccctcctccctctgccgcgacgcccccgctcccctcctcctttttccaaagaagaaaggggcgagccccctttctctccctccttttccctttttcctcccgccggcatcatcctccctccgccctgtcgccgattggacgcgagcgccgagcgccagctcgcgccttgaccgcccaaagtcggtttccaaaccgacattgccgcccttaaaacccaagcctccccctttcccttcctctcccattcgcctccactccatcgttgccgctgctttccgagctctgtctcgcctccgccgttcatcgccaagcgccgggagagccggtgcgttcgtggacgcggaaggggactacgggcgctcgtcttcctcctcttccccggcccaagg

SEQ ID NO: 51352 - DNA, 572 bp, Oryza sativa
ctcctcgttttcccttttttttgacacattgtattcctttcatgcaaaatttggagttagcttatcttataacatgaaatatgtgcaaattaagcgccggagagataagccatgtggcatgtccttattcatggaattggtctccatgcaaaataacatgcgaaagtgctcgcttgcatctagagagatcgagaaaactgcatattttttgtttaaaaaaaggagagaaacgggagaaatattaggatttctaacccatgattttttttctttaaaagcaattaatacatgttaaatcaaaattcaggcaagtaactccatgatagtaacatcctatatgaatagaaaataaaacataaattaaatagtgaaaccaaaggagttacagccttacagatttatcatttgaacaaatacaatctactacagacttaattgaaaattaagactaatcaagcgtaattacaagtacttatgcaagtaaccccaagaattttcctacaatattaagaaaatattgagataaatacagttaagacaaatactattaccatgttcatatcttatattct

SEQ ID NO: 51353 - DNA, 750 bp, Oryza sativa
ctcgtggctgcccaatccgttgtgcagcaacctctggaaaacgtccaaacttgagcttctcgaagtggccgaacttgttggacagcacttttcgcaccagctcaggcttggtgatggtcaccctgggcactggcccgaaccaggtgatcgacactttacctgccaacaaatatcacataattacgacaagacttcattttcgctctgaatttgtgattacatggatcccttcattcaaatgtatcatcgctttcacaaatatcgtatgataagttgcagttattttagtttataattcatgattatatatgataattgaacatgcttattcaagaaaaataaaaacgatagttttcactaaaagaaaataaaaagatatttctcacaaaaataaaaaagaaatccttgcaaaaagaaaaaaaataaaatttgtagtaacgactaaaaatagggggaaagggagataaggaagcatatcactcctctatattattgacttaataagagacctcgagtgctcatatattagattgtggaggatagaaaattatgcgaaataatggtgcatcccaaatagccaaatgggcatgttggggttcaaatgatagaaatctattattgacaggtatgcgtgaactccaaggtgccacaagattaaatccatatgtaaatccttggccttaataaatcaactgcagataatctggcaccatcatgacagaaatctggttcatctctacgtgtatacct

SEQ ID NO: 51354 - DNA, 617 bp, Oryza sativa
cccatgctccccatgtcgttgtcccgctcctgcaagggatagacctatgttagccacgtcttttctgtttgagatccttccaaatcctccccccatcttaatttcttcccatctctccggcggcgccggcgccattcgccttttctcccaaacgctcaccggctggcagcccccagcctccccgcctgctcgttcggccggtctcggcctcccccttcgttgatctccaacctgagcaccgtcgaccacgccgacgccggcgacgcctcgcccgcgtacaaggtaccaggtactgcatctgcatgcatactgcacacacgtgtcttgctgaattcctccaccgtggcaatgcggcggaggtcgcgctgtgacctcacctcacctccggctacgtggcgccgtcacgtggagtgattcactaccgcaatcagtgacgtcagtagtatcagataggatttcggagttattctgtgggacaggatggtcactaatttccggttttggttttaggatatcattttctttttagtgttggagaacaggagaaggcaatcattgattgttacttttttagtaattggttagtatatctgcactgcactctgcacacacgtact

SEQ ID NO: 51355 - DNA, 872 bp, Oryza sativa
catttttttctcctctttcaattttgatgactgcaaggaatgtaaacgagagcttgtcgggggcgtgtgatctcagcatcgacatcagcatggtagagacccctcgcgggcaataaccggtcggcggacggtttgaccatggtcgagaaaactgaggagaaccgtatgaaaccgtcacggcacacgacacggtcgcgcggaccattgaacggtaggagacgagacccgtagcaagtgggtgtgcaaccgtgctgtgcctatccaacgcgaccccatgccgattcgtctctccaagttcctctctccgaaagcgaccgcgatctgttgaggaggaggaggatcacgggattttcaccggcctcacgggagatttgccgtgttgaacgtacggcagctgtggaatatcaatcggtcgaagagaagatacgcggtagtacgaaacgtgcctacaatgggcgggcagctaaaaaagggaaggcacacatatacgccctgcttggccggagccaagaaaaaggaaagaaaaaacgctggtgctcgtgtagtcgctgaaaaaagagaagaactacacgtgcgtgccgtggctggacgcgccggccagccgtccggctagatatcgtatgagtgtacctaatcgccatccctcgcggggcgcgcgcattgctccggcctcctatcgtgcgcctttgtcttttgctcgcgcgtggctttagttttgccgtgcatgagtgcgcgcgtgacagcgccaccacctgccgcctgctggatctcggcttaaaattgggactttagctagctttgttctcctgttggtgaggggcagcgatcacgtaaaacgggacagagggccatgtgaccacaaagtataaatg

SEQ ID NO: 51356 - DNA, 720 bp, Oryza sativa
gagaaaggggagaagtgggagtagcctataggggagcggggggtgggatccgatcgcagggcgatcagccctggcgatcgatcgatcgcgcattagccccccatgcggcatgggcttatatgactcgggaaaatatgtggaaccccccgtcacccggtgataccgctcagggcgtccgcagtatgactctaccgctctacgcggctgacgaaacagctcactccgcttcccgagtcacgagcacgccggatgggcggcgccgcggcctttctttgctccgccgcacgtgcgcgccgcgccggcgccgctgctccccctctctctccgcgcagagccgcaaacctggcgcgcgatggccgcacgcgctccggcccccggcttcccgttccacgcgtcgggtagccagtggacgcagccgcaaaggaggagcaaaagatcaagcgccgtccacgtgtaccccaccaactccatgaattcccagggcctccaggtcgtcaccgatccgacgtcgcttacagccgggcccggaatctaccggcccaaccttgccagtgactaaccagaacgacgagtacgattagtagcccgattagataaagtggggactaatcgccaatattaaacttaacaggtggactccgctggtggcatgatgagctacccatcctcgccgtccacgtgtacacctcggcccctgatgccccgcaccaaccgtcctcc

SEQ ID NO: 51357 - DNA, 545 bp, Oryza sativa
tgtacatggtaatggttaaagttgcccttcgcggctatagttgcctcttgcgcgaggacttaaaaataagaaccactatacagaggtgccatattgctaattaacataataactaggtttgtccccattctagaaactgcggtcgtacctgttcgtcgacataagtacctggtaaaacttatatcgatcgagacagtactagccacccggaaatcatccaaatcttacgtactgtgccaatctaagtataaggtattttaaccagattgtaagcaaagtaggcaatactaaaattatctgggtttctatgattgatttatgcatataaaatagaatattgaatagaaggctataaataaataatttgtaaaatataggtctaaatgatcaaaagttatatggtaacttgccttgctcgatgtcctgagattcattgatattatctattgagtcagaagaatcctcaagacctcgggctagacatataaaaattcaaatttaaaagaagttcaaataaaatccaaaaataagaaaaatggagaaaa

SEQ ID NO: 51358 - DNA, 557 bp, Oryza sativa
catccgcaaacagtgatgttgtggccgagcgccgaagtcaccaccatcaggcgcagaccttggacggcgaggaattcccgcgtcatgaattccaaccgatagtggcctcggctgatcgagggcctcgagacgagccggctgctggcgtccgttccttctcaacgccaccagaagcatgcttgccagcatcacgagccatgaatggagctgctaaagcaaatatatatatgatgagaagcaaagagtaaaaaaaatcacgcgaacagaaaggtcagtgagaattaaaagaggtacacgaagatgaagtacaaacttgtggcttccctaccgagattgaacaatattgcttgatcaggtcgctgatggtacgtggtatttatagggtgcttaaccgaagcttatatttgggagtatttggctaaaggaaagtgacgtgagttaatttggcaacatcattcatacttccacagccagatcgttgttttcagattaaaacatacatggaaaacatctgtacgagggaaaggatcatgctagaatcgataggggaaatagaa

SEQ ID NO: 51359 - DNA, 557 bp, Oryza sativa
tggttttcttcattcacaaaacacaaaagccatacctacccgaggaaggttggatacatatatatatatagccatagctggctgctagcctattgctgcaccctcctagtctaaaattcgaaatttaaatgggatgctgtcctagagggcatccaaacttaataaagcataaaggaggcataaaggagatgctaactgctgctgtcctactaaccgcaactgtcctagcaactgaaaaatatgctaaagggtagatgctgtcctgaaaaaggtgaaactacccaaaagcaaaaagaagaatcacgaccaaggaccacaaagacttatccaacaacctcaatggaatacctgattgaatcattgacaagtagccttgccctgacaagtttggatcttgctaggtcactgtcctccttgtcactaataaagtttagcatggttagccttgccaagtgtaccaaagtaacagctacctgtaacattaggaacaacaggaaatcaatcactgtccactggagatggaatcatttcaaaaactgtgttaagtagtcgcaata

SEQ ID NO: 51360 - DNA, 630 bp, Oryza sativa
ggcctccgccgtcgcctccgagcccctttaaaaggatccccgtgctcttctcttctcgccgtgtcgcgtcccaaatcgactctaaaatctatcctcgaaattgtgcaaagaataattaaaattccatgtgaaagcctccaacaattaaaatgtgcaaagataaaagtcaaatgaggcttggaggatttttgtatatttcctaaaagcctaaaatgcttaaacaaattttagtggaattttcagagcacaaataataattgaaaagaaataaacaaagttgaaaaggtttaaaaaaaaaagaaaatcctaaaagaagttctttttccccccccccttccctcttgggccggctcggcccacttctccctccctctctctctctcctcccccgcggcccatcggcctccccgcgcgcgcgcgcgccgctgacaggcgggcccgcccgccactctcgctgacgggtgggacccacctgtcatcgccttcctcccgccgcgcccgtgccctagcgccgccgccgccgcggattgtgccgcatcccgccgtccccgcgcgcattaaagagaggggaatcactccccgtgattccctctcccgtttcccccgttttcccctctctctctccctcgg

SEQ ID NO: 51361 - DNA, 541 bp, Oryza sativa
tgcctttggcttgcttagcacgtgaccccacgtggtacgaaaggctaggaggaaaagcatttctcgggattcaatggattctctccattgggctctctactttgcacactaggctgcaagcttgacttggtgtgaggaggctggtttagcgatgtctgccctgctaaaccaaaggaaggggcttctttggcatatacccatggacaattcagggcatagtgtccttgttctctacaatcatgacaaaaggggacatgctcctctggcattggaagctcattgacctgggtggcaaatgcttgatcaaacacatactgattttggtcttgacttccaaccaatggtagctgtgaactaagcagtatgcttggaatggaccaagggtgtgccctggttaactctcttgaggccagtggtggattgagttgaaaacttgagttacttgaggcatacccgctgacattctttcctttttctctgttaaacatctgttacagggattgaggtgagagaggaaacaagccaggaaagaatagaccag

SEQ ID NO: 51362 - DNA, 2624 bp, Oryza sativa
cttcggccgcgggccgaggggagagagggaggactttgggccagacttggcccaaaggaggaaggagggttatttttaggtttttctttttaataaactttgttaattgtttttgttgcttaataattatttccggtgctataaaaattcaagtaaaatttgagggctccttttagaccaaggagaatttaacaaaaattctccgggccacatttgaatttttcttgcacgtattttagtgtttgccaatttctttccgaattttaattaattctattattccttttagaaaatgatttttaattcgggatgaatttatcaggacgtgacaaatccaccccccttacaagaatctcgtccccgagattcgaggaggctagcaagaagataggttgggcggtcttctcttcttgtctgacttcttccgtcgcgtcttctataacaaacttgcctagcaaaactcctccactctggactgcttggctcgatctcctgttgcagatggaatcttctcttcacctgacttgtccctggttgaacctttagctgacttcgactgggttgtggcacttgatgatggggcttcagatccagaacttctcatagttcatatctttggcgtcaacctcatacaacttacccacttcatgtcatgcgtcaacactagcttgtcattactaggataccatgtttgtcatcataagaatatcatgcttatcatttacttctaacttgccactgaatgctttggactatgatgtcacgcttatccagcataccatgtttgacaacttgtcactaactgcatcatattagctttcctggcctccgggtgctagatactactgctattcgatgcaagggtcgataacttttgcctttgaattacgtttctcaaaagaaccaacttatcccacttgacatgctttgacatctttctaaatgactttactgctgaacttgttattgtctgatcgttttcctgccaaatctgaagcttcgttgttagatgtgattttaatctgacctctgtaaactatcttcgaacatatcacttggttcataactgggaatagctcccatgaacaagcaactcggattcacttgctttacattcagtttacttcccactattcacttcatgttgtcctcagttagcattcaacgtattcctttacacctttgaccttgatgtgttctttcccgattcctcttatcaatcacctttcgacctacttctttgcctggtaataaacatctttttcgatatctcctatcagtcatcttttgacctttgtcaactaagtactcttcactccgagagttgtggatgcttctggtgacgatgtggtacttgagcctgctgcctttcagagaaaccttcaagtggttcgtcaaaagctagactggcggttgttgcctttgatccaaagaggacacatctgaaactctcagtccaaacaaaagtctctttggctttttaatccgacacagtttaattggttttcttttccatcaacaggttggttattaactcgaggttagaacatagttcctctggaatgagaccctaggtctcctttgacagtaaacaattatacgcatgatcccatatcagcatcttccaaaataatcctcatagaacttgtttttatcacacatgtctcccttattacatgaatacaaggcactgccttaaacaaaaagggaaggtgcttaacatcggtacattgtatcctcgacaggaatcatccataaacgtagcaagctcattatttataatcatgaatatatttatttattacatgattgctgcaaactcccgattacagtgataagtagcgaactgaaaatcacaaacatggctacatagctggcattgttctagtgactgcatccttgattggttctgtgatgatatgataggactgcatattgctatcattcacaggagaagcttccttctgattgctggttgaagcgaataacggtcttctgcttggtatcgccctcctgaggttgattgccctttgctcggcctggagtaggtcggggagagacacaacttcttccatcgacgacaattctttgctaaggccgtcggtgcagagaatggttggtgctgaaggtattattgctatgatttattgcagagtcaggtgcagcaggaggagcattggtgctgtggatgatatcgtcgatgttgttgttggagctgactagctgatgagacaatcgtagggttgttcgttggatttctgcggtcttggtcaacaacacactgagttggcaatccttgggcacatggtttgtaccttcgcatagaaaacatgtgaccttgcgggtgggacattcacctggtggatggtcttcctcacaatgagggcagagtgtgagacacatgctagcaacatgtccaatttctccacaacgggggcatgcttttgattccatctcttcctcgccgagatgtcggggagactcatcttcatcatccgaggagacttgatctgacccttcactatcagatactctgccaccatggcttagaaggtgctgggtcaactgtcgtgcacctcggaaggtatttcctctttgccgtctaggaatagttatccctgctg

SEQ ID NO: 51363 - DNA, 853 bp, Oryza sativa
aggatcgtctttataaaatggctttgggcaactaagtgacttttaaatgctgtttactgcaaaacttaacccctatatcattaccccttgtacccccttgcattaatcgtgcatccgccggtgtggcttgctgagtactgtggttgtactcattcttgctctatctttctccccccttcagtaagagaagctttggagaagaagtcttaggtggagtcttggcttataccccagttgagcgcctgtgaagatggagccgtaggcccgctagtccgctgctgtttatttttgattgtcaggccttaagtgcctttgtaataatgtaaatattatcgatataataaagatgtgtcttttatatcatgtttgtatggtgtaccccggcttttcctgggacggggattaatacactagcgttcggaaaaaggcaattttcccggttgcgacaagctggtgtcagagccatcccgactgtaggttaagccaaatggataaaacctaaggacatattttataaataaaactatttgcgaaagttccttttttctccttcccctaatgctatttgcaaaaggtttactccgtttttccttcttcggactttcaactagtactagatggttagttttgcgaagaagaagatggcgtcaattgtccgtcaaaactccagaagactgttggatcccttagcgaagcaaaggaagcagtgaagccagatgtgaagcaagagtgaagatcttgggaacccatcgcagaacctaagccaccctctagtgtttcgtttgtcgtgtgtttccttgcttgcgtgtgtagcgcgtggtttgcatcagtgggttgtgatgtaaccatgcta

SEQ ID NO: 51364 - DNA, 1494 bp, Oryza sativa
tcgtctttacaaaatggctttgggcaactaagtgacttttaaatgctgtttactgcaaaacttaatccctatattattattcccttgtacctcccttgcattaattatgcatctccggtgtggcttgctgagtactgtggttgtactcattcttgctcaatccttcccctcttcagtaagagaagctttggagaagatgtcttaggtggagtcctggcttataccccagttgagcgcctgtgaagatggagccgtaggcccgctagtccgctgctgtttatttttgattgtcaggcctggagcgcctttgtaataatgtaaatactatcgatgtaataaagatgtgtcttttatatcatgtttgtgtggtgtaccccggcttttcctgggacggggattaatacactagcgttcgggaaaaggcaattttcccggtcgcgacaaaaaccaaatttttgccactttgattttgcaaaagcaatctctctctccttctgtttatgagctaatctgaaacaaaaaccaacaatgtgtccatctttgccacaaaaagaacaagtatatttttcacgatgattagacacattggtagcattagaagatttagcagcacaagcaacaacaagagattttgcatgcacaacattggattttgaagaagatgcactcatagtagacatgataccagcagatttaaacacagttttgttagtatcaggtttaaccaaaatctcaccccttctagtaccaacacctaacacaacaggaggatgtctaaaattatgagtataaggattaaaacctaaatcacggttatgtgtgctaacctttgattgatccaaaatcatgttgaggttttttttaccatcagaaaatcttagcaaagaattttttaaataagaaacctctttttccaaattagcacaattttcacaatctaccatgacacctttgcttttacgacatttagggcaagaaagcacttcattgtttttcacaacatcttctatgtactcaacacgacctaaagcatctttcaatttcaacttattcaaagcacatgttgagcaatccaaaacatcatgaggttgttttaactttttagcagaaatcatgttaaacatcaaactagcatgaaaagcaatttgatatttttgcaacaactttttagttaaaaacaactcatccaaagtgcctgtgtgcaaggcaaaactacaagcaagagaagatctatttttcaaattatgtgcagcattaacatctctaatttttgaaatctcattcattaaaacctcacaatttgagcaatcatcatcattaggaataagagattttaatctagcaatttcagatttaagagattcaataataaattccttttttctatacatcttctcacacttctaatttttttcactcaaaatattaatagcttcctcaaaagcacttacctcattatcttcatactctgtgtcagattcaccacgcgccatg

SEQ ID NO: 51365 - DNA, 920 bp, Oryza sativa
tggagggctggaaataaagtcaggtgcaccgactagatgcacctaataggtgtagcccccgacaatgtggttaattgaacaaaccaagcatatagtcaaggaataaataatccaaccaaccgagtggttttgataatcgtaatcaaccaagtgacttgatatcaatatatagcatatgcggtgtgaatcctccaaataacatgatccgagtgatataccaactgctttgtaaaatatgatgagtgatataacaaaatagctataaagaagcttgtatattgtgaataaagaaatttccaaagtattgggcatacgccatgcgcacactgctttaacagatgtgcttaagtccctagaagacacatggtttcaccacacctggaaatatatggcatatgtggtgtaaaatccgagtaaataaactcataaaggatttaccaaccgcctagaaaatgaccacaatatataatcagcctaagccataatattggtcaataaaaatacacacttacgtggcgaaaagcaatgatattgtatctaatcaattgcttaaaaacccaaacagcaccttgacttatatataaaaaagtcagcgagacagctatataaagctttactgtttgacaccttttaagatgcattgtaccaactcctaaaaagttaagtaactgcggtataaaaggattttaaggtattgggcacttgatcacgcgcactttggcctaagcaaaaagtgcctaagtccctaaaagaacgtgacaggccacacctgaaaatatgggctgcagacatattaggcctaggccaaaaaatatgccttcgacaccctttaaaggatgacgcatgtgacatgctcccgagtaataaatcttccgggtaatatagaccaagcgtagctcatatgaatagcttctgatctg

SEQ ID NO: 51366 - DNA, 607 bp, Oryza sativa
ggttagggattcaggttctggattttttttttttttgctttgattcccttcaggctaagaaaggaagaagtttgtacttatccagtgtttcagtatgttgtatctagaactacaaatacaaatacaaatacaggatatggttgatgatctgcaattcttcttctctatatactgtctgtgttgatcttttagattgcccaatttgggattatcagaaaatgtttctagattatcagaaaatgtcatcaatccttatatgtttctaaattatcagaaaatttcctttaaaaaatattatgagaaaatggaagtgttgtaaacatctctgcttgttttccattgccaaacagactccattttggattttattaaccaatatagtatgtattctcctggttattacaacaaatcacttgttgcactcaagtgcgagatttagccatcaaagctagatggtgtaaaaagattttgttgtttccaccatcttctgcttttggtagatggagtaaaaagattttgttttaaacctttctgatggttaataaagctgtttttttggtgatccattaagctagcagcacttaccgttcccatggactgaagatgc

SEQ ID NO: 51367 - DNA, 586 bp, Oryza sativa
gattgatttgacttaaaaagaaaaggggttgtatttgaagcacatattacagaagagcaattaaaatgaaacctactcaatttcgatatggtgatgcaagatttatatatacaaatctatgagatggtagaaactgactcacatataagggaaaattgcaaatattttttatcacaaagggatgctatacgattggcaatatattctataacgatgtttcctgaatcattgaagtatcgaaaagttacaaattcataattaaggaacagacttatattaaagatattagaagtcagcagtttatgacaggaaatggcatcactaaatcaccaatcagacaagaaacattgcatggagtccagttctcccgcttataaacaccattccacattcttccttatcgtagtattccatgtgcaatgtttaatgtgtaaatgtttcattgccacagagcaccgttatgttatcttgttgcatatatcaggtgtatagcaaaactgaacatttaataactaaatttacaaactgagattgttggtaaaaaatcgtgcaggataggagaccataccatagcactaatacattt

SEQ ID NO: 51368 - DNA, 741 bp, Oryza sativa
agtggatcccccatgtttttctttttctctcgtttttaggcgcagaagcccgaaattcatttctcctgttgggctaaaagtcacacttatatggtcctgggaatctgggatgggcgtgggtcagcccgctggtaatgattaattggtccattcagattcaagtaatcaagattcgaaaaaggctatttatactccctccttaaagatcagatccgattgttattcctcaactataaaactgggtatatttactcctccaactattaaactatgcaaaactatactctctcagtggttttagaatggttttggccacatggagtccaatggatagcccaataattagagaaattaaaaactaaagtgaggctcacctgtcggtgattctcccatcttctcttatctatcctctctaatccccattcttctcgccctcctgaaggtcgacgctagtattgtcaagacagaataggtatcagtcggcttcgatatcaaaagtagtcttggccgtgtttggctttaattgggccaaaaacactagacgcaaaacttacaacccaattacacccaacacttcacataaagaaataagttcactttaggtccatcatcttaacgacgagtttaaattgcgtccttgaaaccataatacaaagtataacgcatctctcaccttgcaatataggtgtacacgagatccttaggcaatagagttattggttttagctgacatgacgagtt

SEQ ID NO: 51369 - DNA, 665 bp, Oryza sativa
ctccgccccatctctcttctcttgcgtttagtatgcttttcatttacaggggatctaatcctgactctcgatgcacaagcctacagtggtaaaggcaaataccattgtatttttttctctatcttttttgtctttcttttttctttattcttggtttttgccgttgtttgcagtagtagttcttacagggggaattaagagcatttttcccctcagattggagagatcgtagatgttttcttttcttccaacaagtgaatttttttaaatttttttggcgttgtttattatgcataagatgtctcttacatacatgtgcatagaaacggcataattgataaatggatataattaatgagggcacttttgtcttttcacgtttatacaaaatttgcattgaggatctatgaatccactctttttaaggacggaggaagtagatctgttctatcacataattttttcctccctgcttgagttcctctcacacttcctccaccactatcgcgacaaatcaagtggtgtgcatactccctattcctcctcacctcttccataagagccctgttcccccctcccctctcttctcaccttggcgagatagacggagcgcacagtgatgaagtcgtcatcacagatgaagcgaagggcgaggtggccctgtc

SEQ ID NO: 51370 - DNA, 1715 bp, Oryza sativa
agttttgtggttggtcggcttctagattgtgtcaaagaaactgatcaccaagctaagatcattgtggatcatatggattattttactagtagaatttctttgccactaattgcagagggaccagatgatctgggttgaagctactggtgtacgaaatcaaatcaaatcagatagtttgcccttcttgttgacggagacatcttggacatgatgacttggatgttggtttcagatgttggtagaagtagtcgttgaagcttgaaagcagctaagctatactacctccgtaaaaaataaaaaatccaaactgtatgggatgaaatatttttctagtacaacgaacaatcttatgctagaaaatatcccatccaatattagttgttgtttttttttgacggagggaatagactatagggtgatctactactactgctctcctatctctgtcagacgctcttcatgcgctctgaggcgcatactagatcgatcactagatgaatttgttttcacaaaatagatgaaacaaaattgtactccggaccatcttggtttgaagccaagtcataccaaattgttgacccttttaatagtactttgttagtatttgttttgctatcaaaatgtgccaagaacacacattttgataaaaaaaatggtgttggagcaaatccaactagtgtattctagccttttctgttgcgttcctcctcttcaatttggggattatgtacacatttatagtctgtacaagacatgggaaattacattcataaccctacagacctaaacccttcccagtgagcagataggcccacctagggggtaactgagtcatttcctgggagacaaatgcagggatggcgcccattaaggcggcatcttggctcactttggggttcccctgatggcccggctacaggctattacttaggtaatatccctcccccagtccatggcgagctctggtctctgcctcaccagccgcaccagggtgtccgagggtggttggcggctactatgcgctttaatgaacgcccatccttgctgatgcctcgggctccgtcaaggaagggagatgctccgaagctggtctccctcagagctgttgcgaagccctaatggagcctcacctccggctcggtgacaggggattcccctctggagccagtcagccaggccacaatccttagacttggctccggtggagagcccgaatcctccttttgggtcccctgaggatacctccgaagcggaggcccccctcgacgcattaggaggctctccggaagttgctgaggtcgaagctacttccccaacaatggcactaccaaaacataccacattgccatctttttggcatagtaccaaatcaaacaaaccctccctccgtaacacatgtcaggtattagctttttacacggtttccaacatatactatgactattaatttcaattctactatcatgatacttctatatatattatgcatcatatgaaaatgtatttttaaatacgaatctaatgatacatgcatgtacaacactattagtcaaaatttttaaacatagacattgttgaaaacatgactttttatattttaggatagaacgagttgaacggatcgcaacgaaggctgaggttgaagataaactttgaaggcaaccggattctgaaattctttgtgtacagatgtaactgatgcttttgaagtagtg

SEQ ID NO: 51371 - DNA, 1937 bp, Oryza sativa
ttagcctatgtgatgctacagtaaacatgtgttaatcatggattaattaggcttaatagattcgtctcgcattagcctccatctatgtaattagttttgtaattagtctatgttcaatactctaaattagcgtccagtcatccgatgtgacagggattgtccctgtatccaaagtgccactaaattcatatgttttaaaaatcctaaaaaaccccgatgtgtgagatatctttgtatgttttccccttttctgtgtcttacaagccgtatggtgcaaaagaagcactaaagcagagcacaagacgacacaacccggggactggctgataataaccgcttgaagagaccagcggttaaggtatcttcgtcatcaccggtgagtactgtgaatatgtgcgtgagatgaattgaatgaggccatatatcgcacacaacaacggtgtgacatcgcgatcgaatttgttaggagttaggtggcaggaatttggagcaacttggagaaaaaaaaaggtgaaagaggacacaaggatagatatggtggctattggtcagataccccatattgtcttacaattatcgttcaggtattagccggtctacgggtgtcttaaaatgacctgcccatatgtgataaaaaaatcattgtggccagtggcggagcggcctggccccctccaacaaaaatagtttcacatataatcacctatctataattaggtaattaacctaattagtgtattaataattatataattaggtcccctgcaagacttttaggctcatcctatatatagccaaatcctggctttgtcactgattgtggctcatgagttttcgatgctgcccgaagcatagagtgccgccgggcctgggccgcccatgcatatattataattggttggcctacgcatataattgtgtgaattatgctatcactgaaccagaacgtttgccacaattcagatgtgttgagttgttgaaagtatatgcatgtgacaagttatattcatgatatatatgtgtaccactcttcatgattaagagcaatagtaatgcgtcccaaaattttaccgacctcacataccacatagactaagaaccatattagctatatactccacaatgcatgttacttatagtgggtcttacctatctctctcctcacttttatctctccccctctctctcctctcacttttcccaccagtctctctctctctcgggcggaggaagcgaagcggcacctgtggcgagcagggctccacacctccacctctcctcgtcagggccggaggcagcgatgtcatcgtccgagcccaaacctctccactgcctccttcgccgtgggtcaaagctgccggagccggagccattgctcaacctcccgctcctccgtgagtccatctccatccctgccgacgagccggacaccaccaagcacaagcgagcatcggggcactgcccccgcagctctagaagcccaaacaacatcggcagtggccgccgccacggccacaacgatggcagtgtagaggagaggtggtggcatggcccaagcggtgacgacgccgggcggggctccacgtcgggcaggcaaaagatgcggacgacggcgccgccgagttacggatctcgggaggctcttctccctctccgtcgcctcccttgtcggctccgaatcgacctcggcggcgcggcctctctctcttcgtcgactccttcttccaccttctatcttcctcattgctgctgccacgcagtggcagcctcctcgagctcacgctgtggcggcggcgacctccccgagcccacacgtcggatctggccgaagaggcggtctaggcggtggcgtccccaagccctcgcggtggttgcagaaaagttggaggagaggagcggcaacttcggatccattgtacccgcttcccaaggctcat

SEQ ID NO: 51372 - DNA, 1453 bp, Oryza sativa
tccttatgtgattcctgaagctattaatactgctgctgaaaaaaccgcttttgaacaaaattgcaaagctcgcaatattcttttgagtggtatttctcgttcggattatgatcgtgttgcccatcttcaaactgttcatgagatttggactactttgagtaattttcatcaaggaacaaataatattaaagaacttcgtcgtgatcttttcaaaaaggagtatattaaatttgagatgaaacctggagaagctttggatgactatctttctcagtttaataaaattttgagtaatcttagatccgttgattcttcttgtgatgctaattatccacaatctgagatttctcgccactttttgaatggtcttgacatgtctatttgggagatgaaagttacatctattcaggagtctgttaacatgtctactttgactttgaattcactttatacaaaattgaaaacacatgagatggatgttctttctcgaaaagttgattctaaatcgagtgctttagttttttcttcttcctctttggatgttgatgcttcttcatctaagcttcttttcttgctgtttttaatgccacatccgatgatcaactcgaacagatcgaggaggagaatttggctttggttgctaacagaattgctcgagctatgaataatgccaggaacaggaaaagaggtggtccaaattgttgctttgaatgtggttcaattgatcatctttgttcgcattgtcctaagcttgggagaggcaaaaagaagacaaagatggtgagaagaccaacaacaacaacaagccgaagggttcataccaagggaggaagatggagaatcttaggaaggcttttcaacaagtttgcgccgcgttcgagccactaagtgatgtagatggtgagagtggagatgatgataagggaaagaacatctccgatgtttgcttcatggcgcgtggtgaatctgacacagagtatgaagataatgaggtaagtgcttttgaggaagctattaatattttgagtgaaaaaaaataagaagtgtgagaagatgtatagaaaataggaatttatcattgaatctcttaaatctgaaattgctagattaaaatctcttattcctaatgatgatgattgctcaaattgtgaggttttaatgaatgagatttcaaaaattagagatattaatgctgcacatgatttgaaaaatagatattctcttgcttgtagttttgcgttacacacacgcactttggatgagttgtttttaaccaaaaagttgttgcaaaaatatcgaattgcttttcatgctagtttgatgtttaacatgatttctgctaagaagttaaaacaacctcatgatgttttggattgctcaacatgtaatttgaataagttgaaatcgaaagatgctttaggtcgtgttgagtacatggaagatgttgtgaaaa

SEQ ID NO: 51373 - DNA, 1597 bp, Oryza sativa
  unsure (1)..(1597): unsure at all n locations
aatacaattgcagtggcttgtctgctgaaataacaagctaatcgaagcactacagcaccaaaaacgttttttctaccaaatgtgtttccactaatgatttttttcttcactctcatggcaaacaagatcatcaagtagcaagcctttagaacagccttcgaaccaatcctccagcccatagcttccgtattcctagctgtccagcccttcctatcatattgctaagatcaaccttgcacctcgaaccacgcagcactcgcccaaagcaaagaggccacggaacccaaagctaccgaaaccgcgccgccgctcctagatccagcgcggcgactcggcggatccagcgtgaggaacacgtcgggggttcggatctagggttaagggaaggaagaaaggaaggaaggaagagagagagagagagagagagagagagagagagagagggggtgggggagcgggcgacaacgcaccttgtggtcggactcggaggcggaagcgaggggcagccccgcgacggtgaggaggaggacgactgcggcggcaangatgaggtggaagtggtggccgccgcggcgatgcatctcgtccggggcgagatctgggcggggcgctgtccgtgaggggaaggtttggtctcgcgtctcgtttcagtctcgccgcccgagcacgagctgcctcctcatacggggaccttcggtgtttttgcgggaggtgcctgtggaatgtggtatttcatgcagcatgatccttcatttgtttcgtgtagtgaaagtaaggcagaagtagtttttttatacttttcaaattttataaatgaccatcctttttaaataaagtcttaaattttgtctctttttttttcaagataagagtgaaggcacatatatcactatactcgcgctccgggaatatgtgcccgaacataaggtcaaatagatggagactagcagcagctccttaacctttgctaaaattctattgaaagcacacgctcatataatttgttgctgtcatctacagtacatagcatgagagactatgatcctatgggggtcatttgcttaaaagctgacctcaccaaggtttagtttcgaggccaattatagcttgttatagagacatcatgaccaacaaaatgataaaaggcataagttagccttagctagggaagatgtttagtttgtgttaagtgggtgtttatttcaagaaatcgtgggcaaaggctattatgctcacgaacgaattatctaagaagtgtctaaattttgcatgtgaaaaacatgtcgtgtttatgtagctcatttcaacaaatatagttttgtggagattgatcacgagtaactaaatccggttatgaccctacaatatatttttgaaaaagaaaataagaaaaaaaaaactttctcatactaggataaaagacctgttttttcatctagacataaatctgtatattacaacgagagtctaggtaacaaaatctaaggcttagggtagaccaccaactagttttgagtatgagaaatggagaagatagatatgctagccttttaattattgtttgtgtttcttttggtgcaattttaggctagtcata

SEQ ID NO: 51374 - DNA, 838 bp, Oryza sativa
ggaacatgacaagctattttgacttcatcaaatctttcatgttttaatttgcatgtgaaactgtgattccatttgataaaattaggacaagacttgaattatcacagcaaatataacacttaccttaaatctcaatgacctttcattagtaaattggttatgtttttttaattaaacctagcgtaactaatcttttggtagcaatggggcactaaaaataaaagggaacaacttattgctagacatacaagagaggaaatccaaaattatgagcatgctaatatgcatagtttatacaggcaataactcttatgtcacatccaagcttttggcgatctaatatactactaacccaacaatctaaaacatgctatcaacacaacacaaatctaagtgacgcatccccaatcatgacaccaacatgagatgcatatacatttgcttggattattgtcacggattgtttatttgattaatataatgattaatattttgaagactaaacttaaaaatagtttagaataggttgtctaatcactgtagtggagagaaagtttttttttttaagaaatcatattttttaagaagtgaggagcaaataatccgtggtaaaaatcttgagaaaaattataaaaggagcagggccattttctcgtagcaggtggccaggtgctagaggcaacacaattacacaagcgcaaaacccatatgtaagagttaaaaatcacaagcttatcttcacgccttttcaatccaagtcctggaaggacctgttaatgatttcgataaaaccagtggtgggcctagcaaagaagagacgatcccttgcaaatgcgaa

SEQ ID NO: 51375 - DNA, 2046 bp, Oryza sativa
acacgcacccctggttgcaccccttccgcagcacgcggcagccgttgcagctcatcccagacgtcgcacacccacgcagcctcgacctcgagctcagccatgggagactcaccacactcgagtatataacacgacgaggtaacctaaccaagggggttgggttaaccgcgggttaacggaggtgaggttaccgcggcctcgtgggcggaacaagttccagcctcccgggctcctgggttgcggggggtgcggctccgcgtctccgcggccggtcggggagcgcgcgggccgtcggatcgggatcgggcggcgcggggtgcggacgcgagcctcgggtggtgcgcctcgcgttcgccccgtccgtcctgctggcttcttggggctgggcgatcgagtgtttttcgccgctgctttttggggggtttgcgggatgcgtggatccgcacattgggacgcgctgcgcgtggaatggatggatggatggagggaaccttgtgtgggggccactttgctgcggttgcgggtggctgcggctgggtagtcggtgcggtgcggagcgatggatggacggggcgcggaaattcaccgtgccaccgtatcagcttgctggtatgtgtaacgtacgtaagcatctcggctttcgtgtttacaagtctactacgcgaggtaaggtttgtaaatgaagagcttacccgacatgcaatctgcggtcaatactcatttcacaggaaacccacgtagtcttcttattactccctccgggttgataatattaggcgttttggaaaacctggtcttcaaaaagtaactttgacaactaatttctattataaaatatatagaaatttcaacaaatatatgattttattgaagtactttctaagactaatctacacattggttttcatatttttaagataaatattttagaaattattcgtagtcaaagattttaaagtttgactttacccttgttcaaaacgactaatattatcagcctggagggagtatattatttggaaattgctaaatttcaatcacctaaaatcttagggctggtttggttcgaggtctaaattaggcttaccaatatttggcaatttcaatagtgtttagtgtatatttggtttgacgccaaattttggcatgcctaagaaaataggccatttgaatagtgaacttagacaattttggcttcaatccaagcacaactttgccttaccaaaattagtcataccaaaacttgataaaatttggtaaaatctatatttagactacaaaccaaaccaacccttaatctatctatttgtctgtctatctgtctatctatctatttatctatctatctatatagacttttatactagcttgaaaagaagcccccatgctatcttcgtggtttagaaaaattaccacaataattttaaaataaaatctaagctgttagatcgtgttaggaccaaattataacaatgtatgttaatagcaatagttgtatacaaaggcaatagaaactgaagaagatagttgtacattaaattctaattctactattaacatctacgtttataaagtatagcatatataaaaacatgagctaattgtccaatttaactaggacacataagattgcatcgggaaatttccctagtttgcagttaaatttgtttattgtataattcatgctaagtttcgtgacgataatagagtcttctctgtctctggctacggtaacgacaacgactgtgatgctagatttagagtttagatatgagagttaggggaggcgttggagaaggggaaaaaagagggtttcactggacttggagaaatgaccgtggatgacttgcaagaaagacatgcggcatgagggcatctcgtagtcgattggacgtacagaggagaggaagagaaaggggaggaaggaggctggctttctggggctccgcccgtgctagggaagcggcaaactcaccgccctggaaagaattagagatgtgataagctatatatcaaaattctctttggctgtactggtagccacaa

SEQ ID NO: 51376 - DNA, 1355 bp, Oryza sativa
gcccatgcgatagcaaaatgtaaatggaaggtgataggaaataagggaacctatcccgcctgatgtactcagatagcatgtaccaggattataagggataccacatcacacttaccgccggacgcaccctcactatataagaggtggcggtatgaaccctagggggtgacatacactctcactcatattcactggacatagatacaatccacatacaactggattagggtattaccttgtattgagggcctaaatcagtataaacatctgtgtcaccatctctccttgatcttgcgcaccctataaattttattgctgatattagaaatcgacatttatgggagagaggagatttgtttggctgtttcgcctatgagagcagttatccactaaatttgtatgcttgacgatggaggagagccaaatctactctcctagccagggcaagcaaattcttgccaaaactacctttttcttggcaaagctagccttttgaaccacataccaaacatcaggcctagccaagcaagggtaggaacgttctagcctaggatccaaatgctttcctaaatattatgaagttgaaaggaaaaatatagagttaccttttatatcttgaaaaggttgaaaaatagtaagtagcagggcctgtgcaatgttcactcagtcggaccctccccaccctacctacccaaattaaaatctaaattatcaaggggtgagattgctacaagatttgtgtaacaaaatgaaaacaaatattctctccaccctgttgccatcgctcctactcaaccacatcttgagtaatgttgccatttgtcctttcccttgcttgcaccattgtaacccattttcttgaacaccggtgtgctttcctcgctctacaactcctaactcttctttagctcctcacctctgatgagttgcccctaattaacccagatgacccaattcaacttacttgtcagagtttaagtcatttctatcgcaccactgagaaaactgctagcatttctatatgttgtcccctctccctcttcatcaactggagattgaaaacaatatttgagattcaaagaaactcaatcacatgatgagtaaaaaaaatgtcaccaacatcacaactagcatttagattcataatacaatcgatagaatcacaaattatagattgatacatggtgcatacatgtatgatggaaaatttaagtagggaaatttctagctccctagaaatatagaaaaccatctaaccatgacatatataccatgtcaactgtccccatcgcccaaccaaaacaactagataacaatctaaacatgaacaagtattgcgctggttaggggagtgt

SEQ ID NO: 51377 - DNA, 1078 bp, Oryza sativa
aaaaggatggtacatgcgcttgttagtttgtgcatgcttgagatttttgacacattttcttcttttttgggaggttgtgtgcattaattgctcttatatctactttaagaaaccttagaagatattaaaggatatctttattaaattggtgggagaataaaatgcatttatattcctaaatatttgtatggggatataaatctatctgcttttatggaagtatatatattattggactgccaaatttattcattttatcttttcgagaaaagtgagttattacgattgaattagtttgaaatattttatttaacatttattgcaagatatagatcttctgcaataaatgcaaaaggttgttgtgtgaacattaatgtgttttgaactatagtacggttcaataatttgacatgagaattttttaagggggtagggacaaaatttcaaaaacaaattaatttaagagttcatttaagagttctatcgaatgttatgaatgattgttttttatgaatttcaaaattcgaacaaaactctactgcatttttgttcatccctagatgactttgtcagacaacaaggtggtaggacgaggtgaacgaggatgtatgtaacattatccagtgctagcgatgttgggcatagaggttattcactcagtgttccttgattgcgaattcctcacatctagaggggcaaggaagaacggcttctatggagctaccactgatgcaattgacctatgtctacacatgaagaggattgagccatcatgaagaaagtgctttcgtataaaggacattttttaaactaatgatctgttcagattactatcaaaattaacattttcaaaagttgctaattccaaaatttcggtaaattggtagcattgtcaagattttatagaatagtttaaatgtattgttgccaaaattttctatgcattatcaatgtttgataacaaactaaatgcaaccatatatttatcaactttatcaaataatgtaatgatttaaaatgatattaatctgaacatgccctaaggtggctaggctctagaaccgatcaatggatctaa

SEQ ID NO: 51378 - DNA, 590 bp, Oryza sativa
catttggaggcaacataacactcgaagtcgccatcgggctatacacctttcaacctgacgggtcggcatcacaacagtcaagtggtcgcgtccggattgataagatatttctttcttgggagcggggcggcgtaccaacgcgtcagcgccaagccgtgaaacccttcatgctgatgaggcaggcaccgtgatatatcaacggtttcaatcggtctgataaaatgtcttcaattgtggcatgggtctttttcgctgcgagtaggagacgatttcaagttattttgttggctggcacctatacttggtcccgacaaaattcctttaattattatttgaaggcatggatcttcgcctcgagacctcaggaggacagcttatacctgaagtcatttttattcttcacctattctcaaagcgccagactttctgaacggtgctactaccccacatgggttgatctattatatgaagcaacttgtacagaaggcaaaccaggaattgatggaagagatcatgcatgcagctgcatgagtacagaatttgtgtatggcactgtagcatggtgatgatgcgtcgtcctctgattgctc

SEQ ID NO: 51379 - DNA, 569 bp, Oryza sativa
gcttttgagtcgagggtcccggagttgaagcggcatcagccgtcggcatcacccgagaagagcggacaggagcattagcagccagcacaactgaaggtacatcgtcaataggtaccggagcaacatcggaagaggcagtagctttaagtccacccaaagcagttgcctgctctatcgtatcctgagttgcaagtatgttctaagagacaggttatcaaaccagtatgacatagaattttaagagaaaaaaaaagaataggggaaacacggataccttgccagtgccatcagaagaagaagaagaggaggaggagtcgctcaactggacagcatcaagctccatgtcgggcaccacagagcggcggcggcggcgacgatcatcgcttgaagactccgtggatgacaccctctcgtaaactacggggttttttcctcgcttctcacgcatggtgcggtccagctcggggtgtggagaatcttcaatacgcagaccctttttagaagatttcggcaatggaagtctgtcaggacgagcagttctctccttcttatgacgccagtcacgcagg

SEQ ID NO: 51380 - DNA, 692 bp, Oryza sativa
tctttagtcccggttggtaacacaaaccgggactaaagatcaaatatgcccgttacccttttgaaccgggactaaagatcatctttagccccggtttttattgcatccgggactattgtggaaatcggccgaccgacgaaagatggtttctccaccagtgtacataggtaggatgagactagagtgatcagtgagggagaccactgacattctgcttgtgcttaatcctcttaactctgaagatcatccttcctgggcccccactcctcttcagaaaagcctgaagctagcttagttaagtgctaactatagcactgatccatgattaaaatactaattacctccacctgttaccagcatccacccaaggactaaggacaaaccacgagccaagctccgactattaagtcattaactaaccaaaagctcctcaatccatgccccctcctagatggcactttatccccttcattaacacctctcccatcccttctaccaacctaccaacctaacccccccaaaaaagagagagcatctcacatgctctccattctctcccccctggccccctgatctccctcctctctatctacaagacaaaccttttctttattttttttcttttaaaactgtgcctccttttctcactggctgctcatgtgattgcaaacatttatcaagaaacctaactt

SEQ ID NO: 51381 - DNA, 810 bp, Oryza sativa
gacaggtgcttcccaaaaccatttgtgtgatcagcacaactaatcaaaatatgtctatttatgttcttcacatcagttcttaacatttttttatatgtgcaggtatgccacttgagactttccaaaatgcggtgaacattgaaaaagaaatcgtgcaaagcgcaaagaagaaagcactttgggtcaagaagattgaaaaagtacgtaaaaactgtgtgatatgatgattaatgtttatcacatttttcaataacgaatttatgttaaatacacaaatgctgtttctgttgcagattgtggaggaacttgtgtacattgtgcattacttgccttctgagatcaattgtgtcttctacaaggaacatgaagaggatagatctgtgaaggctaatgggagccctcagcaaactttagggtctgctgatctccagctgaattacgcaaggatcgttatcgccatacaagttttggtaagattctttgacagtcattaggccattgttctaggatcttggtcattgatcaagtgtagtcgtgcatgatataaacatatttccggttttcagttgatttggcacactaactgaaatgtcgaaactgattttatttgttcataaagtttcaatcgcaggtatccgtcgcatcatcggttccgcaatgtgctgtagattcattgttccatgcactgccttatagaatcagatcagttttgctacctaggatgagacacggcgattttgacgaccaggtgaccactcttttctgtcaattccgattacctgacaaaaatgtgtatcctgtatatactgt

SEQ ID NO: 51382 - DNA, 1451 bp, Oryza sativa
ggtctctctctattaccatgcaagtaaatttggtgacatgtaggaaagagaaaggagtatggttgttatgcatgacaacgactcagagtcgactcttagcatttactaaagcaaattttgttgcatggtggtgaaagaaagaaaataaaagtaagaaaaagtattttgatacattaatgattagagaccatattgtctctaactgttgtaggatgctagtctctaaataacgtagagctcatatccgactctaaataacgtagagctcatatccgactctacctttgtacatgccctaaagataaagatggagttatctttaaaaaaaacgagaaatccattagcacataatcagtagtgttttaattattataaacttggaaacatatttatctgatattttatagcaacatttatatggaaagttttcacgcgaaatacatggtttaatagtttaaaaacgtgctaatgaaatcgaggtaaaatctatattttactcgaaaaagaacgggacctgagtacacttttagagaaatattaagctcatatgcggcgcagtaaattactactggcatgtttggtaagttctaacttttaaatttagctctgaagttgtggagttgtctaaacccagctctacctctttagtttattttgtgtgagaactctatccagctcgttttctttttaggtagagttgaaactaaagctgaaactgttttgctgatctagaccgtgccaaacataacctgcattgcgtgcgaggcgagagatttgagatattatgcgctcgtgttgtggtatgttgatagatgtagtgatgagagttgtgacagttgagagcgagacgaagaaacgcgtgagggaattaatgcatgtgccagaatctacacgttcacacttcaacaacactatcgagcttgtcgccgaaccttgcacgttaagatcgacacggaattgacaggtacggaataatgataatagtgtcctactactgctattttcctgctgattctgtgcagcaaccaccagcaactattgctatataccacatgaggcgagaaaaaaaaagatactatgccataccttgcaagcaaaagcaagcacttgcagcagcaaggagctgcgaccatggctccatccaagcagaagccatactgctcactaggctatcagaagaacatttatccaacgaggtgttggaagtatacagcaaaagaacttatatttacagagagaaaactagtgtgatacagggtgtataaatatgtacgggatgtatgcacatacatacattcatattaacagtccatgcccctacaaaactcgcttcgtcatgtcctgatcttccaagctccccataaatatcccaatggtataggatgtaattatgggcggaaaaacagtgttcacctgaatatcttgttgcctgatactgtgatctgcaagct

SEQ ID NO: 51383 - DNA, 855 bp, Oryza sativa
acctccgagattatgatgaaacattaatggtggaggatgctttgccgcaccttacctctctccaaacaggggcggcaaagctcatggtctaggcgatggcaaggacaactggacgaggggtgcggcgtgatggagatagcaacactttgtttgggaaggtgaggatatagtggcatggacaacttgatgataagtgtctataaggtgagagttgggtaggaggtcacggtgagggtcgaggaaggacgggcaatacatttaatagtcacgtgccgaatgcttggtagggtaacaattaaggtgaaaaaaatgtgacattaaatgtttgagacacataaatgaaaaacttgttacaattaatgatcaaatatacttcaaagattacaatgaaacattaatcacgggggatgtttcgttgcatctaaatgcaccaaatattaatagcgaaggatgctttgccacatataaatgcacaaaatgtatgttatgttcccacttattaaacacagttgaattcttttatgaaaaaatagtgaagtcgatacaactagcatcaactatccgacacaattttagtttgaattccaaatctgatccacacattaagaaaaaaataaatccagtttatgagtagtaatgtggttgtaggaaatgatatgttgtggattgccaagggtggaataggggaggggggttgttgtcaaaaaggaaatcaattgcattaaaaaacaacgatttttatggtgatgagataatgattattaaagacttatatttatagataaaatgtaacaaaagttctaagcatgctatattccatattctcatatcattttaaggtgatggaagtaagtt

SEQ ID NO: 51384 - DNA, 703 bp, Oryza sativa
aagtgtgggttgctctacttggaaagcctctagaatctcagcacaagaacttcactaacttacctcgttccctttcggaggagaggaaatccttcacaaacttacccgggacatccacaatatgcaacggattctcgcgggcgacacctaaccgtctaggagatcatctccaagagtaataagcaccgagatgacagcccacgagatattccaagtgctcacccaagatctagtcttcacacatctccaaatcttcttctctccctctcaatctctctttctcacaagaattaggctctagattgagtggagaaggccagaaacacttgggagaggctagcaatagctctaggtttgaaaaatgaaagtggaatggccaaggaacgagctggaaacgagctgtatatgtataacggctaggtgacgtcatctagccgttactcacaaatttgaactggaaactagacaggaagttccggacctggaagaccggaacttccggactacacttaggaaaatctttttcacaagaccggaacttccggacctggaagacagtaagttccggacttgcatttttggacaaatggagtatttgcaaaaatgactcctagggaaacttgacacttggttcacactaagagcacttgatatatctcagagcatcacctggaaccccttttaatagtacggtttttcctaa

SEQ ID NO: 51385 - DNA, 2934 bp, Oryza sativa
ttcaacgtttgaccgttcatcttatttaaaaaaaatataaaagaattaaaaagataagtcacgtataaagtattaatcatgttttatcatctaacaataatgaaaatactaattataaaaaaattcatataagacggacagtcaaacgttggcacggaaacccacggtttgtctttttttggacagagggagtaaatgttagtgttgtgtaataaaaaaattgatgaagtgaaaacattataagacttaaatgcatgtttagattcatagttacaggatactctctccattctaaattgatctacatattttataggtataccaagaccaagaaaagctaataactcttttatagtgttatattcactctagcaacaaacttcatgcatgcaccatctccactatttcctagccaatagaaaatcaagatattacatatgggttataaatacgtgtgtgtatggatacatacgttaatgtccatttactccaatgcataaataacgaatagatttaatgaatcaacacaaatacgtagatcatttaggaataatctaaaaaaaattatatatagatcaatttagaatagagagagtatatcatatcttgtacgagaggttgatttattctaggatgaagtaagtatctttaagtagcgggagggcagcgcgacggacggcgcaccggtggggcgatcctgtgttgttagctgctttcccgtttcccttcttcttcgttgccttttcttttttcttcttcaatctcgtcaaatggcttgatgtgcggtccgtgcctgtggcagaggacgccatggtcgcagacgggcttaagcgcctcgccgctggcgtggaccgatgcggttgcccacggccgcgtatattcgatgacagcggcgacagtggttcattggttttttttaattcgttgaatactatacgtggagttgcagtaagatgtagagtattatctagatggattacttataagaaaacccccctagcttcgggaaccatttatccaactaatttgtcaaacgaacacgtgaattgcgttcatatagttttaaattcatcatttattttgctcaaccactgcttacgcaagatggatctagccattgttttgatttcgagtgacacaaaacatagaccggggcactagtctgttttatagtcaatttaatttaaaatgaagatagtatatattgaccgttccgtcgtcaaatcaaattgtgaactgcaattataatatatggccgtctcttgcagtcttcaaaacaaaagttaattcaaatgtaacttgtaagaaagagacggagccatttagcaaacaaactccaagagtccacaactgcccgctcctcgagcggtgaactttttctctttttttaaaaaaagaagaagaggaatgctacagtagacccagccatttttcaattctaaacgacaaaagactgtttattaactagtactactagtctatttttagtgattttaagttagaagttaagagtgttactgagagcaagtttaatagtatagtcaactactaacttcaaatcatctatagtcaatgtaatagctaattcatacaatagttgattactatactattaatacctcgtcatactatcatacacacattacgtcttgtagtccgtgctacaactgactacagatctgtagcccgatgcttttttttctcttcttttatctctttaaaatatatttatagctggcttatagcctggcatctgctctaacgtgtgcaagttggatttcaaactttcttggcgtcaaattaattcaaattatgcgaagtggggattgcatcctagctcagcttgtattgattaagaaccttgcgttgaagtttggttcctgttcaccaagttgatatccgacccgttcgaggtatcgacacgaatgctcatacttttcttgaagttaaattacaccttaaagcaagtacaataatagactataagtcagctataaacttatatggagaagacaagagaggagaaagaaaaaaaacgggttacaaatttgtagccagctgcagcacgaactctgaaacgttacgtgtgtatgacatgtgggaccaattattaatgatgtagtatatatttgtagttaactattgtatgaattggctattagattgattatagataacttgaagctaatagttgttgtctatagtattagagcctatttggaggagcttaagattataaaaagcagctagttggaagccagcttctgagaaactggaaaagctgggtttctgagcttctggcttctagttcattttctggattatataactatatcttctcataatttggatcaaaagctggactgtttggggagcttctgattctatgagaagctgcagcagttagaagctcatcaaatagaccattaaacttgctcttatggttgtgtttgatacaggaattcccaactcccctctcgttttccgcgcgcacgcttttcaaactactaaacggtgtattttttgtaaaaagtttatatacaaaagttgcttaaaaaatcatattgatccatttttggaaaaaaaaactaatacttaattaatcacgcgttaatggaccgctccgtttttcatgcgtgggtgatgggttcccaacacccaccaccgaacacagcctatatttgcaaaaataagtatgggtagaaatcagattttgtacaacttactaaatagttatgctttgttacggataaatataaattgcccacatgatagtattgtttagaatatacttcgtctattccatattgatccccatataaatttttatcaaaaccaagcaaattttaactaccatatcggggtaatcggggtaattaaaagcaagggcgaagtgctcgcacgagagaatttgggacggcgtggacgcacgcg

SEQ ID NO: 51386 - DNA, 1105 bp, Oryza sativa
tggccatacaaatgtatgtacagcttcaccgtagatggggacaagttgggagcatattggacgtactgacaaccattccaactggtaaatggacaaagagataatgtagctagctgaggtagttttcatgttggcctcaggacaaaataaaaggccagcaactatagctaggctaacccactaattaacactgatgtctcacctaatagtgcacaatccaatctactaccaaatttaatcttggagatgctttttggtccttttgtttcatcatttttgttttggagcaacttttccaactccaagctggtccttttggttccttgggttctagaagccctgtggtgtgtacctacctacctacctaccaacttccccttatttggtacctaaactaaccagcatggatactgttggctaatagtctactgatcaatcaattgatgtataccattacaaagattgtgtaatagattatggaaagagatggtgggcatcagccatttggctacctatggtaagagtgtactagatcccttaattagttttcatgatctaaccaataggcacataggaattctttttttcttcttaagttaactgctaacaccactctctcttcactactggaattccacggggtccctagggttttcaaatgttccctagagccctaattagaacccaaggggataataagttccctagagccggaactaaaactcaagggaactgagatgatccctagagtttttgcttgctcatagggaaactagtacagttggcactgataggagaaccacggtggcagggtccactgactttttcagaaaccaaccatgtggaaaggttgtaatagtttctcccgccttgtgaatccaaaatttggactgacaccatattcgctttccattggaaagtaataaagtaccccaagctgtaaactttcccctttcttcttccttcaacatgttctttcatctcttcctccccaaatcaactccctctccagtctccaccaccaaatctactctcaagtagtagagatcgacaggagcttcaaccttcgagggtggttgcagcagcactcctgaaggggggcagg

SEQ ID NO: 51387 - DNA, 945 bp, Oryza sativa
ttttctgtccaggtggcattcaatccctacattttggaacacgtggaaagcttctttccctagattctactaagaaaacccaagggaatcaatttgttcccgtagaatgcttccctatgggccattccctagggttcactgtagggaaacccgatccctagagtttttggctgttccctagggtttttagctctagggattactggaagtgacacagaagattattagacgaaaatggctagaagtactagtaggtttattgtgatattacagaaaactatcgtgacttaacgtcagtggcgtatgtatgggtggtctaacttatataattttttaaataccctaaatataactaagttaaaagtataaattgatcaaatatacatagtaatataataataaaagagttttttttaagatttatgttctcatatgcatatatataaatatatatgtattgggataggattttttgggtggtactgggaccacccctagaagcgcctatgcttgacgtggctatagtagtgtattaatactaatatcttagggattaaggtagatcaagttaaaagaacaagctagaacatctgagtacaggtcgtccatgtgccatgttattctctgaacacgacagaaacaaaatattctaaccaacttcaatttaatttctgacatcaaaacagcacacatgcacattgatttgttcaacatggaaataaggatcattaaacaaataacgccggcggtgtctgttccttgcaggccattacgttgctttacgtagtattactggtaaaccagggaagaactttctccatgatacgccatcagaaaatgttattttcatcgctcgtaattgtcaccccagaatctctctgttcagaccacgagcctcattttattttatgcttatacttattaaacaatttaattttttaactt

SEQ ID NO: 51388 - DNA, 662 bp, Oryza sativa
ggggaggagaccggagaaaattagaaggagaagaagagaagcagggagaggcgcacaaaaacaactcacattgatctatttgctggtggtgttccgaggagattagaaacttctcggtgactcgcctgcagttcgtgagcaagcgcgccacagtgagattaaatatctctcatcgtcgagccgatgtcgcaagtggagatgatggtggtagatggtaagtatgataaataatcctctccaaccctgttggtaaaccagtcgttctaatggattatcggagtacctccttctcatcaattggagcgctttggaaatcaaatcgcctccattttcttgaagcataaacttggatttgtctaatctgcggattggattatcctcgtattttttataatcaacactcttatttttatggtgcgcatgccgggagcgagccctaaattataaacaaaggaggagtggagataaaaaaaaaaagatatatgctatgttcatgaccgacgaggccaagcaatgcattggctaaagctgaaaaatgctatggctgttatatatgtctatttataggcgaaaccatggccgagtgctgacaaggccaggtcactatactattaacacgtctagtctaaaatgaacgggagccggatacaccgttgctgggc

SEQ ID NO: 51389 - DNA, 567 bp, Oryza sativa
ccttatgctgccgatcacggtcttcagtgtccgagatttagccactggttcgttggaatcctctgatggattgcctgatattcctttgctggttctcctgacagaagtgtccatttctgatacctaaatgatcaaagaaagatttagtctaattgatgcacgatgtattgttcttgattagccacatcacaaatattgaaatagataggttccttttaaaaggaaatggtgcattttcatgaatgatccgcaaaaacataaccaaactgtgaatatgtcttccccacaaataaaaaaaaaatctattaatatgttttccacacacacacacacacacaaagctgaatatgtcttccccacaaattaaaaaactgtgaatgcgtcttccccgcaaaaaaaaaatgtgaatatgtttaaaacgtagatcctaaatcccacatttatgatgtttctttttatctcaacccacatatgcatgatgatgccctagcatattcttctccctggaacaccaccatttctgaaactttcatcccaaagaaatcaaatcaatgcataaaaccactg

SEQ ID NO: 51390 - DNA, 1143 bp, Oryza sativa
aaatggtgctgtatccatgggaaacaatgtatcccgaggtcaaggtgcttcatggcttcatgtcccatgattttatcatgctcatattttaagtattgtagtataccgttactctaataaaaaataatattagttggttacatgcaacatatttaatgatgtgaatttactcttcgtttacataaataaacgaagatacatttattaaatgatgcccattttggaaaaacctcaataaccttaggccatgtttgacaaatgggatagagaaatgatttcccacccactaaaagacatctttaaatcctaaccattcattctccccctttcatttaatcctaacccttcattcatttcccaatcccaatcccacctctcatttcccattatccaaacacacccttagagaatgattaaaatgggatggaggaagtattttgatgttattgatcttgttaacctttactagaggatgatcaaattgggatctagggattgataataagcattcattcctagataaaaaaaactaacacttgtaatgcatgcaacgagcacggatgcaggtcctctgcagtactgcatgtgcagtactactcactgacatgtgggcccgatgtgcagtactactcactgacatgtgggcccgagggcctgtggggcccacatgttagtgagcagtactgcacatgcagtactgcagaggatctcaattggacgagcacatatgcctctacaatctatatgtgtggtgggaccattctacattcgattggaccattcaacatatctacatagcagccatttactactccaactttatacactcttagggtatccacaatatagcattttagcaggtaataagcattaaatactcacttattacccggtagtaaccattgtaggactagtaagtagttgcagcccggtaacacggctacaatcgggtaacaggaattaaactatcttatttgcacggtgtttctgataaaatgcatggaaataagtcacggctagagattgccatcggtgattttttctgaagctggccctaccttgtttcctactgatatgctgatacattgtggagtgcatgattgcttactactacttgtagacctggcccatactactgacaca

SEQ ID NO: 51391 - DNA, 699 bp, Oryza sativa
ctgatagccagcttgatggtttctaagtaagttccaaagttttttccacataaattctttggtagatctattatatataaaagttagttttttctacggtgttgatagaattatttttttaagagttgtttctttctttgttggtgcctacttatttgtcacgttttatagtcttctataaagacataggaagttttatctatcgcgttgtcgatgatccaatcggctcgttgactttagagtctaggtcaccaatttattcgatgacactggtttatatactttttggatatgccggaatcatatctctcgcaacgttccaagatttggagtttctttgttctatttttggctcttaaatgtctccttctaccaaatggttagaataatctcttttatttaaatccaatttgccctgtttcaggaggggaaaaagcagagaaagtgacgatgaaatttattattcggcagcgcttgtaatattattgcaactggcaggtcagcttctataatgatgtccctatgatatgcaatatgaatttatgatagacttcacatggttggtatatcattgtgaattccctagcaaacaacaacataatacacttaggtcgtcgtactaggcataattaaaccaagaactcatcaatattggttggagataattaagagagcgaggcccccacttactatatatgc

SEQ ID NO: 51392 - DNA, 1051 bp, Oryza sativa
atatggtagtttagacatggtgtctacattacgggatatcattatttggggttatatatgccggtgagaggtgggccgctgatgatgacagctcagtatgggtattcctccgtatttagcaccggttatatggtcatgacgggctgtcgtaaggaactcggcagttaggggtggcttctcgaagtaccagtagggcatcggatagagggtattagctagtatatcaggttaactagtgtatgtatactatgtatattagaagtataggaatatattttctttctcttttctttccacttagcttagatgatatattatgagaatgagtagttaatgcttgtgtgtcactctaccattggattatcttaacccctgtttagaatatgattatcacaagtaatatataaattattagtcaatgttctctctacatgatcttcccacaggataaaataaatacgatacccttggaatactctcgggtgaaatgttacaatggtatatccgtgcgcttgtggatgaactctgtagccataatataccagaagtatttatgcgccattgctgggaattatatatattctattgcccattatctaaaaatatattatattgcctatttaataaaacatggttttagtaaaactatagattcaaagggtctattaaacctcaggtcttctgttcttcccaaacaaaaactacatttttcaatattccatggtataaaacgtacatgctattaactaattcctccccctcttataaattcattttttaaatcctttatactcgatatctctaatccaattagatacatatggattgtattttattatggggtcaaacgaggaagcgattatattttttatttgcattagtggcagtccgccccttacatttttggatgggatgtagggaatggagggagtacggatcttttgtatatattgcttaatgtttgactagttattgccaggacgttataacttcagaaatcattttccacttttcacatcaattgaaaatatctactacaacctaaaatttt

SEQ ID NO: 51393 - DNA, 811 bp, Oryza sativa
ccgcgcctcctggttctacatgcgtgcacatgccacttttctaatagcttgtgcacaacacttgaaatttagaccattaaacacttttaaaaagttgtttttaaaaacattttgccccctagaattttcaacagctctaccttacggccattgagattggtcatatgatgagatctgatgtcatgtacattggacctgagaaacttgtcgagatagcacactctcgaggtcggaggggtttggtgccaacaccttagttttgagtttaatgttttttgcttctattatttttttctcttcttttgatggtaagcactattaaaaacatgtagtccgtacaatgcaccaaataaaatatatatatatatatatatatatattaattagccactcacagaatatgttgttcagttacaaaaataagaaaagaaaacatgggcaactttgaagaaaagacaaactcatttccgtggctgggaattgatcgagcctggctcgataggttgacattatcacatgagtgctcttctaagtaccaggttgtttctacgcaattgtctaactggtacatgaggtcagcccagatgacctgcagtttatgccaacacagcaagtttctctgttccaatgtacgtggaactaagatgttgaatcacagagttcaacctcgatagggctgaggctgaggctgaggtttattgtcaaatgatcaaaatttcagacataactaggtcacaaatacttatccttctaaaaaaccaaacctcaactatccccacttaaacgactcgtgaccaacgactattcttct

SEQ ID NO: 51394 - DNA, 3506 bp, Oryza sativa
caggccaggtatcgccatacgaatcgctgatttctagtgtatcgcagcatctgtgtgtcaagcggacacaacgtaaaaaataagtcccttaattaactgaggcccatgcgtagctatagaaggcagatcagacaattgattggtcaggcctacatgaatggctctatatatccccaaggcgattatcaacgattttagggctactatcacttaatgaagggatcactgatattgattttgcgcccatcaatacttcaagaattatcgacactattataaatggtattctatttagaataacctactttattgtagactaatctagaaacttaatttgatctattaagtactactctactcgttcattatatagctttcaaattttatctaaaaatataggtacttcatcgtctgatgtcaaacaatcacagcttcctcacgtgaaccaatcacaaccaaatcaatttagttccactgctctttaatctcactaaaaactctaatacttactatattttagatggaatatgtagcattgtattttttaaactggtaatattgctagaaaattatattgttagttataacttactagctttgtaaaaacaaattctccattcgatcatacatattcaaaattctgacaatcaaatctatattacggtctgttcactttgatgcaaaaaaaaaaccttaccaaattttaacattaccaaattttggtatagttgccaaaattttggcaagttgccaaaattttggtaggatttcttatatagttaccaaaatttggcagcaaactaaatgtagccattttttggcaactttaccaaaatttggtaaggttaaaaatgacatcaaagtgaacaggcctttagaaaatcttcctaaattctgataagtctataatattatgattaaaatttttgatgcaaatctacgcattgtttacttcatttttttcacgctactaaacagggttgtgttcatgctattgagggccgtaatttttgtctcgccataggccccagaaatgttagaaccagcccaggtgggacagcgggacaaggatgccgcccgggttggttgcggatcacggaacgaggtgagacagcaggacaaagatgctccccgggtttgttgtggatcacggaacgaggtgggacaacgggacaaagatgccccccgggttggttgtggatcacggaacgagatgggacagcaggacaagcatgccccccggtttggttgctggtaagatatgcacagtacgttttctctttcactagcatgttgatatatactctatcttgtcagacgcgagcatgccatttcgtgcttacagtaaggcgaaaatagtttttccactctccctgtacagtgttgaatggcataaggagagatacattgaaacgtaatgaacgaatatgaaaacgatcgaagcaacgggaccaactgcatgaatggcaatatcgcagaaacctgagtagggacggctaaaccataaggctagagcagcgacagtagcacaacctgtacgacacacaacggcaatgctcgtaatagacgaataagaaccggatggctgattataactagcgcagatgttggagacattgacgtaggaacaacaagacgacgacgagagcagtgatgctgcgctcgaaggcaacacaactatatagctctaaggccccgtttagttcccaaaattttttcctaaaaatatcatatcgaatctttggacatatggatgaagcattagatgtagataaatgaaaaaactaattacacagttagagaggaaatcgcgagataaatcttttgagtctaattagtccatgattagctataaatgctacagtaacccacatatgctaatgacgggttaattagactcaaaatattcgtctcgcggtttccaggcgagttatgaaattagtttttttattcgtgtccgaaaaccccttctaacatccggtcaaacgtccaatgtgacacttaaaaatttttatttcctcaactaaacacaccctaagtcaatgcagcaccccgcgactacagtagcccaaagcttgatgtagtacacgtgctcgaagctcatacatcccacgatggattgtcatagatggatcttggttgcccgatgatccggccaatcgcgcatattgcaattcaacagtgaatgatgcggcacaaataggagttgaggacagcgattttggaagacagcagtctgaaatcgtacggttgggaatgctgattgagcagatcaaaccactcataattacgataatttttttctaacccaaaaagtcaaaacgggttggatagtaaagatcgggtagaagaggtgggaatggatcgatcagtgcttgtattggaagtatagacgaggccaggagtacgtaccctagggactacaaaattgctacttatagtcaccacaattgttatcaaagatgtacttccacgtaaaaaggaaaaaaaaatttggcggaaaagagatgtccctccaaacatctatctatctatcgtatactaaaagtcaattaaacttcctagaaacacacttaagccgccacatgacagtactgtttaatctcaccgtcaattttcattaaaattggtgcacccgatactttagaccattagattagatgtattatttaaaaataatactacctccgtcccataaaaattgaatttctaaggaattaaggacatattaggaggacagacaaatgactacaataaccttgtttaatgaacacaatacatgcacacattccatatataaacttgattaaaaggaatgttgagacaatgggttagagatgggatggaaggaaagaagattacaaggaaatgcaatcagtttaatgggtcccatatcagtagaaatacaatttttatgggacaaagattcaatggtaaaaattcaatttttatgggacggaggtagtaataatattttcctcatgtatactgtgggctggaaaaagaaacaaattgtaagtaatccgtgtacgtacgtatgtacatacggaaaacaaacaatgaatcttatctcctgttcaccggaagaaaagaaaacatgcgtaccgacttacgtacgtagtgccattaaaggcaaagatccggcgaaggcagcgctggatccaccgcctcctcgctgggatggcctgccgttcgccacctctcccgtgcctgagatggggtgccaccatgtagaaagccttgctgccgtcatcatcgctcgcccaatggctttccggcggcgagctctggcaacggtgaggtgggggaggggggagagggaaggcgggtggcgctagggtattcgctccccgtgtcgccagcacgtgggcgacgcgggggggggggaccggcccacctctgacaaagattaaacctagattgatgaaaagctaaccaatagaactgtgcatgtctacacttttggccaatatcatcgggtgaagagctggttgaccatcgacgta

SEQ ID NO: 51395 - DNA, 1300 bp, Oryza sativa
gtttcgtcttgtgtctaatgttcaggaatatgcatttccaaattagtataggtatagatagaaatattcattatctttctttttttttggtttgttactaattcaggaaaccttcactgttactgtatcactggcaggtcagaagaatctgcaggaggtaccgacaaaatttcgggtaagtctgtcacatcttgtaatttcctgatggaaaggggcattcatattttggatcatatagtttaaatgcatcattactcgttagataaagataagctgctccatgttgttacctaagtgatgttgtaaatatctttcagtggccaataggaaaccccgacgcaaactttctaccttctgtacacctgtacaactgtttcgagatccaattaggccttattcggttacaaaaggattcaatccgggccgggaatgacaagtatagtataaatttattgtagatacaatgagagaccgggatttatttcaggccgggaacaaatttacccataatagggataataagagaccgggaatcaatccactaatcaagaggtgtgaaactaatctggatgttttgttatacctaatatgagtaaattggttccggaccggaaataaatcacggtctcttgttgtacctattataaattccttgttatacctatcatttccgacctggaacgaatccttgtgttactgaacagggccttactcaacctaaaacatattgtatcatctctaggacatatttcaaaacataaggtgacatttgtttcgttaggacgagacatggaccaaccatatatagccagaatagaataaaaacttttgtgacacgaaattttatttactagattcgtatctaaaattatgtcgttatgattatgttttgtcacgtaactgatacatcatagtgctgtgctaatagagttatagttggttaaagtatttgttacactcccacttcatcttcaacaaatcaacacaaacgcattatatggcaccaataattctcactagatttctcaagtaacttgggtaaaatgcagcagaatgaaataagggggtgaatagagcagttgctgctaggttgatcctcttgtatatgccaggttgctactaggttgggcctaacaggcctcttctttacatgcgatatagcccagcccatgtaagtgatattccttcccacttaaaaatcagcttgtcccaagctgatgcaattgagcctgcgagctgatgcaatttcccaggatcccatagccttgaccttgccttttctccaacatcggcttcataa

SEQ ID NO: 51396 - DNA, 644 bp, Oryza sativa
ttatatagtaccctctagtatatgtaccgaccaattggaaagctcagcacgaattttatatgaggtcttaaaattgacgaagacatgtattagtgttgttttcttgtgccgctcagcacggatagtcgagaaaaactaggtagcgttaaactaaaactaagaaataaacgtaaaaaatttatcgacgtcattaagagtaaaacctatattttcaataaaaattttactcatagttaaatctgattagataacgtggacaaatctccaacatctatccaatggtagttttcagattattttttattacatatgatttgcaccacatttttttttccaatagtcctcccagaccagaatatggtggctggcggatagtagcgggctcgcactgacgcatgcactgtcaccggcatttggtcgtgcacaaacagaaaagccgagaaggccggatggtgcattgtgtctgcgggtttgatgatccaacaaatgaaggaaaaagttgacgaggcggtgatgtgtgtttgctgggccggatttaggtaatgctcgagatcgacctttcgatctagtaaagaaaaaaaagaagactattagtgccagtttggatcggaggactaaaattttagtccctatcacatcggatg

SEQ ID NO: 51397 - DNA, 3079 bp, Oryza sativa
accaaaatatttcaaaatatctcttacaagcatcgcacgtgcctcaaataacacagatcaacatgacaaactatatcacatatgaaacaaaataaatgttatttacatcaatccataggaccaatctgaaattcttaatacaaatacaatttctaaacacaaggttagagagtatctatttgtacagtgtgtataaaactatttgccgcacgcttcatccattgatgagataaactactgaataatcatttttgctccaagacaaactcctctgcttgcatatgcgtacatttgcattgtatactgcagtacaatacaagtcttgaatatgtaaaaaattatagtacctgcagttgatgaacatgaaggtatcttaatgtcagcccatagaaatttacatggaatcgtatacatcaaacaagtacttcgctacagattgaattaaaccaaagaagtaactatggcatatactgaagttgttttggctcaaaaccaaaatctcaaaaaggctccattattttatttcttattctagccaaaacaaggtacagtctagaaaatgatatggcagcattgttggggtaaggagaaaagctggaaagagaatttagaaatttttcagaacaagatttttctaggaataacaccgggcagtaatgactttgaggaacaatataaaggcagatttttaggagacattttaaccagagtgcactaagctaataaaaatgttggatgaataagaacttctccacacatattatacaatgcaatactgcacctttgatatccattatctatgtggatcagatctgcatttgcatcgactttttatttgcctaaacctggccctgaactagactactgaggaagccatgtaaggatgcaaacaaagaacgttgagattttactgttttttatcacatccctctgcagttagaagcaaatgactatgagttttagaaataattggaactgaaacaagtcactattggagaagtgatctttgctgggtgagacaatttccacaatagttccggtttcaaaaagaaccgggactaaagaggttttttagtcccggtttattactccaacgggactaagggatctttaccgggacaaaagttgcacaactttaccaaccggaagagatgaggagttctcctagtgagttttagtactacaatattacaatactagatcttggttcagtaaactaaacaacattgatgtcgctccaacataatgccctaagacaacattcaccctagcttactgaactacagcttgtattagtattaccatgctagaaatcagttccgtaaaataaacggcatggtagttgctccattatatggaggcaacattcatcaattcaccctagtttgctggatcaatctaaaatactaatttataagcttatattagtatagtaactctagatattgctgattaacatactctgggtttctcctacggtcaacgaagatcagcaacatcacagttgacaatcaagataatcattattcagtaatagaagtaaacatcgtcgtaactatgacataaataggtagataaatactatattagcatcgacagtcagaaacttcatgtttttttggttctatttaacctcagatggataagaaaattaaataaatttgacaagttcccgtaattcacaaattctgtggccatatattagtaacttagatgtatggaagtgtgtgttgtgaaatctcctaaacagttgaagacaacattggtgtttaatgctttgattgctaaaattaaagccaagtattgttcggaacataaggaatctgacaaaatgatgacgatgaaagcttgcattacctgcttaattaggaagtaacgacaagtcatcgtggcccctgcttccactccacccaaaatataaggggaaaatgcttacgtatgtgataaataaattaaagttgtgaggaattcagcattaataaataaaccaagtaacttacggtttaacagaaagtaaaagaaggcatcataattatcatgccgctaaattaatcactaaaaaaattaccactggactgcccccaaaatctttttttattttttttatctttatcattctagctctgcttgcaaccacatgtcaaaacttgtgccgcttgatccaacgtgctgggaaggtggagaaaagcggctgagagctcggtgcttcagcgtcggagctcgaggagggggtaatgccataagtggcctgcgtgtcgacgttgggcaagcaggttctggtagcgtcggagctcggggaggggatgacggtgtagcatggctggccggcgacgtcggggctcgacgcgggcgagaagagaaggagaagaatcggccgtgggagaaaagagatggaagacagggcctacatgtcagcgaggtggggacagacattttgggcaatacgaaattgagtctcattctggtgccttctacttgtagtagaaagtaatccaaaccgttgatcttatttgatcaaagggctgagatctgtttctactaccaccactcttaatggtagtggaaaggtggaggggtatttttgtccacggaaaagattttgtagagggtgtattcgtaatttatcactccccgaacctagcagccattctgtgtgtcgttcgtcgccaccaccccaaatcgcttccccccgccaccgcctgtcccccgccctcgccgcctccaccgccctctccgactcagccgctggttccgccgcctctgccgattccgcctcctccgattgcgacgaggagatgattagcctgttgcgccggtggcggagcggctatggtgtatggcgaactgcatggcgttgacgaggttctcggtgcgagtacgagccggggcggtagctgatgcacgtcagagacggggaagcttcctgccctgcgtcatcccgatatgtaaggtttaatatatcgcccctttgctttgctgttgagatggtaggctttgtgcggttctattcatcaatctgttgatcgagatggtaggttttgtgcggttctattcatcaatggccagctacaatatggct

SEQ ID NO: 51398 - DNA, 821 bp, Oryza sativa
tacatattcaattatctgggtataattggatctttgcatagttgtctaatactaccttagctctttgtgagattttttttcatttttttgaaaactttatattgttttttgagatgtaaaattaagagatatatgacaaaaagacaaaaaccggaatagcgtgctttgttaatttatatctcattaacaaagttcagattatccatgcaaatttgtcggtttgtttatttatgtatattacctagacgtgttatacctttttgagattttctgagaacttctataaaaaatatgtccatgtttccacctaagatagatatggttcccaccgtatactttaatttcctaataataaactagtccaaatataaatcctcaaaggaaagtttaaaaattgcggaccatgcataaaactgttcagtaaaggataaaagtttaaaatgacggcggtgtgtaaattttgcgaggacaaataactcaatccgtcaattttttggagcacaagtgaagaatttctcaaaataatactccctatgagccagattagaatattatatgacatacatgtttttaaatggtgtttgatattataatttgaccaataatctccttcacgaaatattatgagatattatcaccaattataatattaacatcacatgaaactattttctagagtggatagaattatacaacatgcatgatactgaatatacatattattagcttaacgattattaaggagttagaaacgtttaatttcctaaaattgtcagcatgcatcttctatattttggacggagagtatggtggtatacgta

SEQ ID NO: 51399 - DNA, 1828 bp, Oryza sativa
aatttaatgaaactaatttggtgtacagatatttctattttttttaaattcctataagcttgatcaaatccaaccacgtttgacttaacataaacctaaaatatcctattaaacgcaccactacttaaaaggagagttgtccgtctgctccccttcccaactccatgacgcagagagcgacccatagacctccttacttgagagtaatcactctcccttaaaaacagaaaagaaaacctaaaaaccattccatcatatgggccgataaaaccatgaaatggcatctattgcaacacatgggcatttcgacctaatcaatgcgtctggtaactaaggatgcccaatagtttggtgtaccataagaaacactattccatttcagcgataaataaaaggaacaaatcagggaaaaagaagtgtacagtgaacaaacatgcagcacctggatcgaaggtggtcgttttataggcagcggccgacatgcttgtggtcgaatgccacttgctggctgttcctgctgccgtccgtgttgaggaaccgaggtatgctgaaaaaaatatttctgttgtaaatattttatagaatactatcgatcgcgagccataaagatcgggcgccaacaaaaacatgcacacaagtaaaaagtacgcataactgtatacaagcaagataaaaagaaatggcaagagacctcaagggatatgatttaaatttaaacatcaagacatttttgctttcaaaccatatatgatctaatatatgattatcatgttgaactgattacaatcaaatattttaaagaagatttatatcctgatgaaaaaaatatatgtatgtttcaacaattagatttcggatgtttcataggtgagaagaaagtgtttaactaaaatttgtcagtgtttcatatttttagttctcttgttgttgtggaattttttaatgttgcacaaaatattatttgaatgtttgaatgagtattttctaatgtgacactaggtcatttgcaaatattgcacataatattttgtaatgtttcaatagttacaactcaatttttcatgtatgataataaaaagtttcaacaaaaaagtatttgcaaatgtattttatgttttcatataattttttgatgtttcgcttgttgagacttaatgtgtcatgtgttggtttaattgttgcactcaatattatttatgctgcatctcattgcagcatttgataaaatgatggaatttcttttacgagtggtgaaacaatggttgatttttttaaaaaaataatatatacttttcattaaatataatcgtgcaagatcttattttaaatattttgttgcaataaatataattatgtgatcagattatagattagataaataattcaaagaaaagtttgataagaaaatttttatacatttgggttggagggggaggagttcactgtcatcattttgccaagctcctttccattgtcaccataattatagtgattttttttgtatttttatggtcccacataccatgaactgaaaaattatggcacaatcttcttttgctagtaaaattatgggtgggtcacttttttttctagtcacaagttatgcgaatgcggcacaatggtatggtgaaggggtgacaatgtcagtacaacttatttgcttcttctagcgtaggtattgcatgaggccaaaagattgtgatcaatgatggcattggtatgacggagagcagtgcacatgaagtctaaggcgacatatattgtatgtacggaggttatgacggagagtagtgtacgtgtgtgcttgtcaggccatgtgggccccata

SEQ ID NO: 51400 - DNA, 1321 bp, Oryza sativa
ttgttgattgcccgtggcttctctggttagattaatatttttttcaagacattgtgctagaacatctgactgattaatgactccgacgttggtgactctttttgggttagattcatcatagtagtctaatttctgctataaaagtttactccctccatccaaaaaaaccaattcttttttgggttcaaacctaggataggggtttttttttggggggggacggaaggagtatatcatattttactgtaggggagaagtccaattttccactcttttactctgtcttcaagcaacatttgttggttattaattttgttttgcttcctctctccatagtgcaatgaagctaaaaagtcaacatgaaatacaaaacggtgtgtcttgtgttaaatcaaaagcatgtgatcgctgcagatgttgattttgatgttatatttgattcaaagtagttcaactgttcaatttgtcccttgtactttcttttgtaatgaaatcgctggatcattccgcactgtggttgagcctttaattggatgttatgtgtattatccgacttaatgttaggaaactagatgactttaatatattcaatggcactaaagtgaaccatctttcgatggggctccatgttaacttcatgttgtagtgcatgtacttatcttttatcttttagatgtttggtatgatttaaatttgtggagtacggctcttgtgtcagcataataatttatttgctcagtgtacaacaatgtatgatcaaatcgtatggttagattattttatgataattagcataatgccctttgcattgcaatcggattttttttttaagaaacagctcattgtatatatattttaaagcctctaaaacaaggtattcctactgtcaaatatatcatcatcatgctagctttgttgtcactttgtaggttgttgttacttcctaagtaaaaaaattacattacagtagtattccattgtcatttttctctgtgggtcctgtatagggtagttggaggtggtggtggccgtgacagacttaccaccaccattaccatgtcttaaagtcgatgtgatttcatataaatagatgtgattttgtataattggagaaaactttgatattgtttacgtgctttgcatgtatcagatgaatgttactctgtttgtctatttacggtgaaatatgtttaatttcatccatattgacaatttcgtatatagtacgtgcatgattactagtcacctctataaggcactctgagaaaaactaacgcttaatccaatgtgtcgagtactctcacctctataaggcactctg

SEQ ID NO: 51401 - DNA, 4370 bp, Oryza sativa
cgcgcaagaacaatagtaacatgaacactcgttgcaagcattccctccatcatctgatccgagatgtcatcttgcacccggcgcaacttcttggaaagagcagtggccgcgcagaagaggcacacgatgttcctctcctggcacgccgcgatgagcgtgtgggcgtggcggagcgtcgagtcgagctcctccagagcagctgccatggcggggttgctcctgatgatcaccgtgtcctcgagctgggagagtatgctgctcaccctgaccactcgccttctgatctggacacactcctgcttgttctggcgaaccgtctccacggcctgcctgattttgagcgctaattccgcgatgtgcctcacgctgcccaatgaatcagccatcgatccttcctaccgccttgcagcatgtacaatcaacaaattaattcggatttgcgactaaaccaaccggatcaagaagcaagagaaaaatatatatagcactaaaagtttaaacaagctcgcactctatcaccaaccttagcctataatcttgcgaatttctgctctcctcgcggtctctgcctcttccaatctgatatgaactgctcactctcctcaagataggccagcactggaggatagctatatatgtactcttttcatattactccctcctctaaatgtttgacgctgttgactattttaaacatgtttgaccgttcgtcttattcaaaaaatttaagtaattattaattctttttctatcatttgatttattgttaaatatacttttatgtattcatatagattacatatttcacaaaagtttctcaataagacaaacagtcaaacatgtttaaaaaagtcaacggtgtcaaatatttaggaaaggagagagtatattacaagttgttagatttttttagttaaaattatttaagtttgatcaagtttatagaaaactatactaacattttcaattcaaagtaaaatattacttcctccgtttcacaatgtaagttattctaccatttctcacattcatattgatgttaatgaatctagatatgaatctaaatagatatatgtctagattaattaacataaatatgaatgtagaaaatgttagaatgacttacatttttttaaacggagggagtatcagaatatattcaatgttaaatgtaataaaaataatttggtgttgtaaatattacttattttaaaaataatttaaaaattcaaacgatttgtaatatgggacggaaggagtagtatatatatacaagataacgaaggtagatgctacttcctccgtttcacaatgtaagtcattctaatttttcccacattcatattcatgttaatgaatctagataaatatatatgtttagattcattaacattaatatgaatgtgggaaatactaaaatgacttacactgggaaacggagggagtatattatattatgctggagatcgatgcaaaacggactaaactaatgatgccaagtacacggtgttggctagctaggtcaaacgtgtgtttgtgctaatttcttaattgtttccgtggaaggtcaactgtgttaattaggatcccgaactaccgaaggccaacacaaaccattatcgctatcggtttgagaaccaaaagaaatcgccattcctggcaagtacgtgcagccttgacagttggcaccaacaccaacgtggatgatgtttcgcacacatgcacacacacacagctgatgaacaagacagcagcaaacggtgattgctatcatgtgcaaatttagtcatcgttactatttaattacatccttctggaaatcaaattaaatatatctgcacaaataaaaagctttatccgaccgttggttgtcctacgtacattagtttgttccattttttagaatgcaataataatgtatccatcctcaagttagactacaattaattgttagaaatttggtcataatttagcatattttaatccaaaattttaggacaataatcaagacatacacaatgagaagcgatctggtgatgaggctaaacataaacatgagcatgcttatggcaaaataagcatagacatcgttgacgttcacatagaatttcaatcctatggataacattgtgaacatgtaaataacaagaagaaaatcaaataagcttagaatcttatacccagggaatggtgcagaagatgttgaggtattcatattgcctccgttgatgttgtctcatccgttctctccattagaagtgatcgtgaagcagaaacagaggaagatgcaacgttatcgtcgaagaacgaagaataggagcagtcgcgcttgaagcgctacccaaaaatttgatcgcccgcctacccatgcagtttctcaagcggacggagttccggaagcacatgctcatcccgtacacctgtgcacgcaggtgaacagaaccgaggaaggattctacagcccaagaacagagggggaggaactcgaagtgcaagagtcgggaagaactgatgttcttccttctggtcgctgcggaatatatatatgcgagtgtgagagtaacgttcaggatcatcaactgtaacatcctgaaacactaaaatttcaaactttttaaaacttttgcatcatgctggatgttatggttgttattacttgccaaactgtaaatcatctcaatggaaaaatcaaattaaaggtgcgcatctaaataataaatacaatttacatgaatacattgttttacaaataaattcaaccaatgtgctaatgtattattaaaggtcacattagaatattttaattaactttagaaatatcagagcctccgagttatatagggtgaatttaggatgatataaagtaaagccaatttcattttgggaaatgatgaataaataaataaataaatattcaaatcaaatatttcaattcttaaacccaaaatgtataggttacatctcaattcaaaattccaatccaagacattttgcagtttggcccctccatcttttccttttcccttttcttccttctctctcttcttcccagccgccactgttcctgggccaccaggtgctcgaccagagccctagcccaagccgcacaccgagcgccacacctccgagccacgaccgtgtcgcgcacgacaggtgtgccctcccggtcaccttgcaccgtgcgccgcgccgtgtgccacgccacgcccgtgtgggcccgccgcccgaccgagccccggattcccgcgagtggctgcgccgccacgagcgcctgcttcacctcgtcccatcacgagtcgccattgaagtggagggataacggccaccacgtcgcccggcgtcaccctagaaaataggcctgcgcctccctactaaagccgttaccactgcccgtcgctgccaatcatgttgccattgcatcgccatcacattgccatctcgtcagccctagctgagaccgttggataatgcgatgtttcttccccagctagcactccctcttctggaaccttatcacataggcaatcatgcccgatcgaagcattgaacccgaatcctgggaggatcgaaccttagccgcgtcgtccacccttgtccgattgccattaggactctagctcagctattgtgtgttgccaatcttatccccaaggtttccttacaccctaagctaagccctcatataaaccccatccgtctctgccttcttcgtgaaatgcatttcgtcgaacaccttgggcgcgtgttgcaccttcttctccgctccaccactgcagccgatcttcgccgtcccgccgtctctcggtaattcctcactcctgtgacttcttatagtccccaagtatctagtttccccgtcaatttaatcaattagggccgtaaccatgccaagcgcgacctccgaagctccgcacatggaggtcgccgtggacaagccatcccggagctcctcctctccatctagctagcaaaatggaaccctcacacgccgtagatgccaacgccctcgtcgatttggtgggaaaccctctctaccgctctagcccatagctacccgaactcggcttcatgacggctcttggcttcatgacggctcttggcttgacgccgtccacgcgccgctatgcgccgtggctgccgtcgggaagtcgtcggagcctcgccgcaccctccccggcagccgccgtgccgacctcgcgccgtaccggctgcgctcggtcgagcccagccgtgccctggatgctgcctcccgttcggctggaggtagaagaagggtaggagagagaaacagaaagagagcagccgggcccacatgtcattagctccatcctatttccctttagaaaattaatcctgtgaaaaagaaaatc

SEQ ID NO: 51402 - DNA, 1137 bp, Oryza sativa
cggaataagaataaaaaacactttcattttacatgcataatgcaggcacaatagtgagcttggcatctgcttcagcaaacacaacacaatcctcagtgacattgtcaccgccatcaccatcaacatcttgactggcctccagtgggaactggatcggtgttactactgagaggtgccgcaactccagtcagatcagcgcttgtagttgattgaaccttgatgtcacagcatgtcttgagcatactgttgagcgtggcaatcgtccttgtgcacagtttgtttggaatatcaccgctggttcctcctcgacttgagctatgtcacccttggtttcgtcggtctcaattgaagacaatgttgttgccgtggcaaacaacatgactgagggcatggatgaactcgtggcaagaacacaggttcaagtgtagtaggagtgctctcagccacaaactcagtgttggcgtacatcggtcctgacatcgaccaattggtaggcattaactctgcgccatccgtgggacaagcccatgcatgctggacatcgagaggcagtagatgttgcggccctaggtgactgctcgagccctctccacatcaccactctattgacgcgaaattcgtcgttcacatgaaagccgagaagatctgcttattttcagtgcacgtcatatcaatcgtttttagcgcataccatttatttcgatcctatatctaataagatggacatagatcgatgatcaagaagccgatcggccagtagaaacgtgagatttatgctatcatcggctagcactaagctatgcataataaacaataaacgctatttatcaaaggcaatcttgatagatcagaccgaactgaagatagtataagattggaattaattgagatagatttaattgaagattatacaaatttgagtataagccaatgcaactcaagatgcaatgagataatgtaatatgaaccaatcgtcatgatataacgtgatagatgtaaatctgatggttaaaatgtacattggctgagatatatgttccgatgtaagtaaattaaagtgtatatcgactaactaaccgatatatctgatagctcaagtctaatataaagataactcatcgtctagcactacaataa

SEQ ID NO: 51403 - DNA, 1971 bp, Oryza sativa
cccctggcaactaaatgaacctgaaacaaatggattggcctctgtggcagaaaattctagcagaggggtcatatttgaaattgaagaacttcaagatgaaaaggtaatggtagggtgcagaacttcagttttttttccaaatatttttagaagcatgactacttgaaacttgtttaagacatcgaaagtccctagtgcatatgttttgattattgttttttttgtttttatattcatagaaaatactaaaaatataactaattgactactgacgtcattttcatctcaaatcttaatcagttaatattccaaggcttgagtgcacacatcctaaaatgacgtccgtttaagaatggagggaataactcccaagacctgttcatgcacaacttatgtgttcttaatcactcagacttatatgttcttaatctttcagactattaagagggcagatacaagcaaaactttgttgcaagcagttaagggtgagaagagtcatatagaagaaaaacttaaccaggaagagctgcagagttccagactgaagcaggaattagctaacgtggagacaaaaaatgtggaacttaccaaggcaagctgaattgtttttatagaattgtgcaggaaatgtgatgcttttttctttcattttactatcagaagttatgtctctacctatttcttatgcatgggctacaattttccatttaagttcatttgatatttaaggctcaattgtatgcaattcagaaaaatatttatcaaagcaatgtatgatgtacctcagtgaaatttgttgctctaggctgctatttcagttgtgtttatcaagattctgtcattgagtgcattcaatgttgaaacctcaatgtgctaaacttcacagcatatcactttggaaatactagaatatagatcgaatagaagatactacctctgctagtgtaggtgctctctgcggaggaagaaacatgctttagtctctatgctatcaagtttaattgctgtgctctctgttatgcaggaacttgacttagtccgcaatcaactttctgctgaagaagcaagggcgtcgcaacttgaggtaggtaaaaagaatttagggaatgaacacatgttcaagcattcagtgaattgttcagatcagaaaatagggtttgattttacatctatactcattttcttatgaaaagctatgaatggtgtgcaacaacttagggtggattcagcattattgttccttgaagacacgttttcttaatgataaaaggaaaacaaacaccttttgcatggattggaacaaagctcattgacaaattaaatcggaaaccagcttaacatgcggcctaaccagaaacgagaaaggcaaactgtttatccctgtacataattggaacctgtacttgccatttagcttatctagctagtacctttatttttttaaaaaaaatggtacacaataaattaaaaagtgacatactttttttactattttatttatgtccatgggctgattctgttgttttcagataacattgttcatttacaccctttacgttgcagccttgaaatgtcatagtttaacctttcacgtcctactactcccatggggatatagatgcaacgataagaatcttttgtttccaaatgccagaacgaaatttcggatcttcaacaaaggctgcagaagatggagaccctggaaaaggagtccgaatcgcttcggcttgaaaaggatgcagagtccgacgattcatcttcaggcagcaaccagcggcctgctgataagggcttctggaggtggaatggataaaaattcatcgatacaggtagtagcatactagcattggatgtatggaggatatttcctgcagagttgcacattctttcaatttttgcccatttcttttttcccctggagagcccagtattcacaagtagatcaaatatcgaaaaatgtttactcacaga

SEQ ID NO: 51404 - DNA, 2704 bp, Oryza sativa
attaaggacctaggagtatgacttatacgctccacccgaggggtagtctacagacggtctagtaccagataagactctgagtaaaacttgcttgcacaagacttgcaattcaaggcgtggtccattgttcaagttgtgagtaagtgtagcttggagttctaggtggatattcaaccttaatcggtcttcatcgaaccgctagtatataaatagtacattggaaaaggcaaatctcagtgggattttgagatttggtgagggattgttggaattaatagatgggctaaggcccattcgaagattagttctttggaaaattacaaaagcccacctcatgggatggcatgcatgtggagtttagtaccaccttgcttattctaggagagggggacctctttaaaagggaggatgccctcctagccacttgaagcatgtgtggtgggagaagaggggaaacacgcgcgcgcgcgcgctcactcgcctggcctggcagtgcaggcggcgcgcgtgcacggcgtacgcgtcgaatggtccacaaaattggctcctcacccttgcgcagatgcagcctccttttgcagttttgttttgctgcaggaaattcagatttgttttgttttggaaacattccgaaaaatccggtgcgtgaaaatggcgtggagtccggataagttacgcgcgacttatctggttcggtttacgcgggcgccctgatcaagcgacctaactctatacaaaccgagccgccgccttcacgcaacatacgcgaactcaatctagggtttgcctcctactctgtactgcatcgtggctcgtagactactccatcccgctcgccggcgtgcatcggcgatcaggagagcaggtctccggaacctctaccttcgacgtcctacaccgggagaaggcggcaataaggtttttgggaagcgcttcgcgcgactgctccatgttcgtccgtgacggctcgccttcctctccgctcgcgtgttgcgcgccttcatcgacgcccgcaaccgcgagtagttcctgccgagcaaccggtctttccgccacttttgtacgtgttcgatatgttacgcatatttgatctgttcatgttttactgcttagtttacatgtgtagatctaatgatatgatcatgctagtttacatctggaatatcatgatttatttatggaataaattaaatcattatgtgcttataatttcaacaatatcgaggttgataaagtcatcgtaggtaaaaaaaagaatggtaagcaagaaatatgagctttgatgtgctttgatatgcaattttttttctacttatgttttagtaatttcactgttgacacacccatgttgcagagtgagttgatgggaaactaaactttctacctgaggacatcccgaatgtatacgtagttctcgtggacaacattacgcttcttgagaaattcgcgtgacacttcctacaaattaaaatgttcagctaatgatgcacatatgtaaaacttgttagttttgttaaccctagatcaattccattaagtgtatctttctaccctttattcctctgtttctttttccggtgccactcccactacataatgaggctaaatgatatagatctatttatatacttcactttaagatatatgtgtactatgtagcatatcatatctgtttccgctacataattcacttatataagtctaagaacatagcagttcctagcacgtatgtgcgagcttatggatgattataatgtacattaatttcaatattatcatgtgagttaacggtttacataactaattctgtaagcaatcctagctattttaccttgtgttgatccagattaattcatgtatgtacatataaatgtaacaaggtatatctcagtacatttttctactttgttctagcttcaacacctcgattgagtattaatttctctaagttaaattatcagtgttcgtgaacgcgcaaaaggttaaattccagtgttaattattttccgtcacatacatcacaattaagttcttaatttccgcattgggtcaaataattaccacataaaaattcaacagaactctaattagattattatgctactttacaacacaatcgttgtcacttatcagtgattcgatcgagccatatataactatatatacagagcgctaaatatgtcctcctcaataattagctagccacgacaattcgccgcaaatatgttaccaagtcatctcaatttggtaattactaatgattaaattcattttccatgttacatcagcgcatcagctagcatatacaagttggcttaggaagaatacaaaactggaactatatatgatcaagaggtcgatcaaatggcgtcacactcaggatcatttttcagacgatgtgcaagcttaattatttgatgactagaagtctagctagaaccacaccaatcgcaaaatgattgaagcattaaaatatagtaagttactaactactctctccgccccacgatacaaaggattttgagtttttgcttgcaacgtttgaccactcgtcttattcaaactttttttgcaaatataaaaaacaaaaagttgtgcttaaagtactgtagataataaagtaagtcacaaataaaataaataataatttcaaaattttttgaataagacgagtggtcaaacattgcaaacaaaaactcaaatt

SEQ ID NO: 51405 - DNA, 639 bp, Oryza sativa
agtcaaattaacatgtcacaatattcatacgtgtgatactacgcacgaaagtttgaaacagacgagcactcgatcgatcgatcgatgaaatcctgaccgttgatgcttgatcgtgtggatgtacgcccgatcagcctacgtacgtgtgatcggcggtgtgcaaattagtcctcggaatggctcgcgcattcacaaccagcactgggatgcacgcacgtactgcgttacacgtctgcattcagttgtggaatctttcatctaggaccttacttttgagatatattacattcagattcagttctttctctcctcctttctcaatttcttctccatggttttttgcgcgcgcattttttaaattgcgaatcaatgtaattttttataaattatagaaaatttgttttaaaaatcatattaatccacttttaaaattttttaaattaatacttaattaattatgtgttaatttatgcttcgtttacatgcttgaaggattatttcccaaactggtaattcttacttaccttagtagttaaatacatgactttattcgtatttaaatatattactttattcggttgagtttgactactatgtttttattagaaataacgtcattgtataaaaaatatagtattg

SEQ ID NO: 51406 - DNA, 914 bp, Oryza sativa
tacgtgggtttgcttttaaaccacctaattttggaggcccaggatgcaaaagcttaaagccatttctaacactgtgatgcatgcaaggcccagagtagaatacaggaaaattctttgtgactctgttcttcaaattattgaattggtcgatacaaaattctttacagaactcatgcagaatcattttcaaattaaatgggaataattcctttttaggacggatctatttgttttgctagggaaataatcatatagatttgaaagcatgagagatgaataggatttcataatacaacaaaaactgcttgactgtcatggttgatcttatcgagccaatctatatttaagaaccacttgataaattttcatgtattaaaaaatccaaatatttgatacattccgtttgaattttatcagttttcgccattaatcgttcggctatcaaatcatggtggaatgcatgaagattgaggactcaacaaaaccgtgtctggctgactggctagctaccaaacagtcaaactttggattcaaacttccaactttttctatcacgtcaacctgtcatacacacataacttttcagtcacatcgtaccaatttcaacccaaactttcaactttggaaggaactaaactcagcctaggaaatctgaagtagtacaaatctagtactccctctgtcccataatataagtgattttgactttttgattgcactgtttgaccattcatcttattcaaaaaaattgaaattgttatttattttatttgtgacttactttattatctagagtattttgaacacaacttttcgttttttatatttgcacaaattttttgaataagacgagtggttaaacagtgcaagcaaaaagtcaaaatcggacggagggagcagtacactacatccat

SEQ ID NO: 51407 - DNA, 549 bp, Oryza sativa
ttgtgatagggttgtctattggatcacctaggtttaggtctagtcgggtggttctatttgcaatggatgaacaacaatagatgaatgaacaaagagggagtgagaggatttagggttgtgaccagtcgttgttgaggaagaggaagtccggccggccatcgtcgttgtcgtcgcgggcttgacgtggacggcggcgacgatgtgctcggttccgatggcggtgatgcggttgcagcagcgacggtgtcgacgacgaggcgtggcgcggcggtggacttcccgtcactggctgcgccccctcgatcggttagggtttatggggtggagtggcggcggcgacaaacctcgttccttgtgtcgttgtaccgtcccgtcctccacccctctttatatggcacagtgtgacgggggcccaccagccattgggctgggcgcccccgatcacggcgcgggtcaaggcccccttgatccgttgggctcaaggggagggagatccatctaatattctcccccttgatctcactaattcctttatcttttctattccat

SEQ ID NO: 51408 - DNA, 2932 bp, Oryza sativa
caaattaaaaacctaaacggttaaaatccaccctttttgcaaggggctaaattccacttagctccacacatcgcattaccaaacattaattcacatgaaaagcaactccatcggctcaactaatctgttctttccgttccattacatatgaactaatattgatcaaggctaaaaagcaggctatatttttatcttacattaatttgtttgtagtaggtatcatgcgaagcaaaactatagtatacatatgctcatgggacgctaggaattgcacattgacctaaaaaatattttaagcctgaatctctattgagatcttgtcattgattatttggggccatttggttgaaacacagcacaactttgtcaagaaaggcaattcataaaagcaaaagtaaacaagtgaactggcgcgtcatcatccacaaatctctgttttaacttttaattagtacgtaactaacaaaaaccaaagaaattattacattaggacatgtacagacagaggaatagtacaagagatgtgagactttcagaaagtacaggaaatgtgttgcaaataaaagatctcagtgccaatgcagggtgtttgtcctctgtatttttatgcattcctttccctctctaaataatctctgtgtgtgtgagccagtcatagtggtgcacattgcacttttcactggtgtcatatcgtttcatgcatcttgcactgattttatgtatgcaaagttggtgtttttgcatcattgcatgagctccttttgcatgctgatgcttgttgtataagcagatcactacagaagctttatatcctcttcctggatgtagcccacttcttcatttgcatcatgttctaatcttcagcacctccatttttgcttttgtttttcttgaagaaaccatagcacccaattctctttctgcacaaaacaaaagaatgggtttgttagatcattttctgaattagatatgttctagtagtccctagtgggaagatgatgattagaattgctattgctgaattaatagcacaataggtcatcaaaaggacataaagcatttgtgcaatgattaggattcaggtgacaagaagccggccttaattaagcttttggaaaaggaaacaaaaccacttgggagaagaaaaaaagaaataaaaggaaagtagccaacatgaagaaagatcctacaaataatttgtctgatcataaattggatgtatgaatgattggagtccatgtggcatccaactgtggccaaatctattcaagaccctacaaatatgtcatactagtctgaaatagtctatctgatgacctatttttaaggataactagtgcaacccacaatattgattactaatgtgatgctaaaaacaaaaaattacaaacaacaagttgaacatatatactccttaaacaagcgcaaccattgacaaacaacggccatatatagaattttctgaaactgagaaaccaaacattgtctgaaactcatcacaaattcagaagccaaactaggagtgaacaaaagactatgtcaagtcatgccccatttgccaagaagactttataggtagaatagattgactgctaattaagttagattgtgatgaaacaagatggacttgaagctatgactctcactagccgtgttgaccaatctgcctccaaacttgatggcttcacactaacttactcaacggggcagtgtaaattgttgggttgtttttagcagcctaagctgaacaattttttcacacttgacgtatttgctgacagagctatactttgatccagtctattaccatctccagactttgaattttgtatgtggttatgtgtgagctcttgacctcagatttttggaatttttcaaaaagttatcttctagaactacttatttgtctcattcatctgttggaaaaatgggttcttgggatggaactgctagctggcaggaaaacgtttaatggcagaaaatcttcagcatatggtggaaatacattcatattattattgttgtttttcatttaatgttgaattcacctttcttatttgtgagggaaaactctataaaaatggagattaaagtgtactgactgctatgtgcgagctattgacaaacagtaggattttcaaaaaggttaacttctagaacaactgttttctccttcatttttggggaaaacaagttttctcaggatacaaaactactaattggctggaaaaaaataatggtggaaaatcttcagcacataatagaaataattcctatattatttattgtttagtatcaaaataacttttcttatttgtgagggaaaactctacaaaaatggagattaaagtgtggtcattgtttcttaattttcaatattttaaattgcgattctgatctcaagcgattcacaaagaacccaacacaatctaacagaatcaagaagagcataattttttccccaaactacaactaaataagttccatcaacctaagttagcaaactctgttctccaacttttttaaaaacaaacagattttgaaataagacaccattcctaaaacccaaccaaactcccattcgagaataataaaaaagagatatgcaaaaaaaaaaagatccaatgaaactaaactttacatctagaaactgaaataatgcacaattagcaagtctaaaataatttacctgctcctgctcctggttgtttgagccttcgggttgccgccgccatggccatttccgatgctgctgctgctgctgcttccatggccgccgctgctagtgctgttggtgctgctcgtcctgctgctggtgccggcctcgctgaactcgccgcccttgctccaccactcctcctcctgcagctgcgcctcctgcttcttcttcttcttccccttcgtcttgttcttcttgccgccggcggcggcg

SEQ ID NO: 51409 - DNA, 1270 bp, Oryza sativa
tcaccttgatttcaccataaaattggcttaaatattggcataccatgtctcatattttcagtttggtatgaccaagtattttgctgaattctgaacgactatgtggaatggctatttccttgtttcatgtgagcacgttcccgaattgctaactaatgtattttatgtaaaaaaattttataggtaagtttcttaaaaatatcaaataaatatatattactcaattaattatgcactaataacttgttttgttttacgtactataaaaatcacagatgaacctctgttttgaactcagccttaagctaaaaccaaaatgaagaacacatttaatatatagacataacctagttagttagttttggttctgaccacatgagagcatcaagcaaatcaacctaaaaaatgttcatgttgttttcctcatccaaataccacaggctgcccaatgcttgggctttttctcaacaccaaatggacaaaagaggcttcccaaaactcctattagccattcatcagtttcaaaaaagtctccacagtagcaaagagctaatataaaaacacaaataagtcacgatatcttgtagtaaaattattattttttaccaggctagcgttcattttggcatgaacaaaattttaacttcaaacattgatcatgtgcacatttcctataaacatgacctagctagttaatttgaatttggctcaacacatggcccacatgagagcatcaagcaaagcaaaccccaaatgttcgtgttgtttacctcatccaaatttccacatgttgcctctatgcttggatctcttaacaccaaatggacaaaagggattccccaaattaagtttctagtagccaattgatgattaatcatcggtttcgaaagagcgcccatggtagccacaatcctcgtatgattgtaacaattaataccacgacaatttcatcacctcggtctcattttcttcaaccacatgaatatatacattccgtagttatattacgtgtaataacaaatatcttctagcgtataagaagccgattcgcacttgtcaaactttattttaaacggaaagtctaaatttcaggtgactgaaataaagtctctttcttaaggctgagttcaggctgagttcgggatgcaaggttcccaaccttacctcttaaaaaataaatcaatataattttttaaagtgatttttctatagaaaacttttgcaaaagacacacagtttaacaatttgaaaagtaagcacgcgaaaaacg

SEQ ID NO: 51410 - DNA, 649 bp, Oryza sativa
ttaatttcagaactaattttagaatgaaaaaactaatttcagaactcgcttggaaaccgcgagacgaatcttttgagactaattaagccgtcattagcacatgtgggttactgtagcacttatggctaatcatggactaattaggcttgaaagattcatcttgcgatttcctccataactatgcaattagtttttctttttatctatatttaatgctttatacatgtgtccaaatattcaatgtgatgtttttggaaaaaaaatttggaactaaacgggcccatagtctcgcgcgcgcgcacacacgaacacacttagtacacgaagtagtagcttgtatgcttaccccgactaagctgctgatgtcataattaggtttgcaaatggcaatgacgtcaggatgacatgtcacatgtcgcttgtgggcatatgcatgcgagtgtgggcggaatataatgcttgtccaactagagcccttccagaaagctacaatttcaggactaattctataaaaaatgatgaaagaaattactattttttttagggtttgtttaaatggatgccattttaaactataccattttaatagagttggtaaatatatgcatccatttagtttcttgccaaactttggtaaatacataagaaa

SEQ ID NO: 51411 - DNA, 609 bp, Oryza sativa
acttttggtgtaccttgcctcctgggacaaggaataatacacgcacgtcaggaacgcctgttgggtgatttccggtcgtgatagctggccccaacgccgccaccgcgcccccactctgccgggtccccacgccgccgccgccgccgcgcccgcacgccgccgggccggccgacggcgccccgacgccgccgccactgcacgccactgccgcgcgcgcccgaacgtgaccgaacgcgagatacgtggacgacctttgaacgaacgcgaatgaacattcacgaaacgcgaacgatacgattacgaaacgttaacgaacgcgaaggaacataacgaaacgttaacgaatgcgaacgaacatgcacgaaaggttaacgaacgcgaatgaacatgcacgaaacgttaacgaacgcggacgaacgtaacaaaacgttaacgaacgcgaacgaacgtgaacgatacgatcacgaaacgcgaacgaacgtgcacgaaacgcttacgaacgtgaatgcacttgtactaaaagtgttagaacgaacgcgtttctacttatacgatttactggtaatacatatatgattatatatgtaacttggcccatttagactaata

SEQ ID NO: 51412 - DNA, 11458 bp, Oryza sativa
gttggctagcagctttgggcatcgtcactgttgatcaaggattcagaagctggtttcgcatgcacgcacatgaacacatattgttgattatggctgactggttgtgctggtgcagctggtctctctgatttgggggaccccaaatttttgtggggccctgcgctgacggctcagttcacacgccctcgtcgacgggcctgcttttcggttcagaaaccttgaaaatgacagaaaagctaactatgatttgtgttaagcactctcgttggttttttcttcagtctaagcattcatacttaaactgcgaggagatgttcaagtatatatatgattgtaagagatatattaggatatgattgatttgtctttcttatttctaatcatttcttatgtctacccatatatattctaaatatatatacttgtcctctgagactaagtacaacacgtcaatagtatctttctgatgtactattcaacataacctggaattaattaatttaagctactaacatgtctccattcatccccaaattcacagcaatttaattttcttcaaaattcacatctaggaaccctagccctacaccagatccaatgctccgagcaaccctacgtcggatccatcacatccaccaatgtcacccatcctctttgccacagttgccgccccttccatccccttcattacctccaccagatccggaaactccaccactgtccctcctatctactttgccgccgccactacagtcgcgttgtctgctagagagggagaagacgaggagagaggtgggagagggagggtagggaggagagagatagtgcatggagagcaagaaaaaccgatgggcaaagggagatcgtggagagtcacagggagcaaaacttaatagcgagcctgtgttgacggttgttaagtactatctctgttttaaaatataagaacctacgaccgaatagcacatttcctagtactacaaatctggacaaactatctgtccggttctaggttcttatattttggggcggagggagtaccaattttgtccattaactatattagaaaaagttccgtccggttctaggttcttatatgacggggacgtcagatcctttgaggggggtgtctgtgacatcatagtgcaattaggatgtggcctatgttttttttttatttaaatgatgtgacatgtgttgttcataagcattgtgtgcactcgagtagtaccatctttgctagttaagcaagagtgtatagccaacttgtaaggcattgcccctccaaccatattatttttaggttgactattttacgtgaagcgagaatggaagcataagtgaggtgatatttataactgagcgtgctagttggatggaggctggcctgccttgttccgaaggattggctgttacaaattgtaaactaaaattacttgcatcatgttatcttaaatttatgagaaaaaaatgtcgcaacaatggagctggttcatatgaaactatcatttttatactacatgttttcattttttaaaaaaaatatttagcatactaatttaaacttttaagaaatattttttcttgtatactaaagatgtctgtatagattttaggatatattaatttatgaaattttatattaaaaatatgataatatagcttctttatctaattaaagacatactcatgtacttctacttgcttctactacctccatccataaattgaaggattcaactattatcctaaaatataagggatttttaatactactcgttccatccagccattcttaatttaatttctatccaacattattctaaccatcttctaactctctacataccccttatttaatgatgggtatcttagtttttttttcatttctccttaattcctataaaattttaggatccattataggacggagatatatagtaataaaaaagtgcttcattcatagactgatttatttgtacctttgtagattatttacctttacatatttgtataggtaaatagacctcgtatataagttgagaaatataattaagtaggtataaagtcattagatgtctaatggtatgaagtaattggtccaccaattttattagaaaattaaggtggatatttttttggggtaatttttaggatcttcttttatttggtggttaacttaattgttgtaagaaaaacaaagagccaagagccagtgggttcgtcttgtccgtgaggagggaactggatacatgtgttgtacatatgatcaataggtggtttttttttaatatatagatctacagtttaaaataaggtccattggtttgggtatgatgacttcagctcaatataatgcatactcctaccatagttactacaatgtagccagttgagatccatgcttggcacccttcagggtatgagtaagaaaaaatggaggtgatgaaaatagttttttttttgtcttgacttgatttattgtatagacaatacataatttgtttatggtgttaatcgatactactaaattttagtggtacttctggtggtacatatataattttctcttttaaaaattagcagggttgatcattggactctacttcgaaaaatctaatagcttcagtggtgaggaccacgtaaaaaatatttgctcaaactgtgaccctttgctaacatacaagttgatataggtttttattttttttcttgtattatacatctaatttccctatgcatgttcgtggggattaatatttgatgaaatttgttaaaactctttgtgctaattgttaacactatttggatggggacgccataacaaagagatataatatagttacatgtatgtttttttttctagcgaatagtagtctctcgtatggacactttttttttcttctcggacaaatattagtctatcataggaatagggtgttcataatgtgcgtctgcatgcatgcatttatatgagctcatgtgattaccttttaaattgttagtaaaaaagtacttttaaagttttgatgggaagagggtggagcaacgggtggcataagacgacgccgtggcatggcttcttttacctcctcgcaaggagtggtcactgcatatatgctcaatttagaaaaaaccttagagctggaaagaaagagaaaactaccatatgggtcaaatcatatacacactcttcttatttttctttttatatatcttctgtaggtatgtacataggagttttaatttgtatgtacataaggaaggattatatggtttttagacagagggattattgtcatagatataatttaatggttgaaaaataatggatcactgtaacagactcaaaatttcagggaaaaaattttgcgaaatgttttaagtcctgctcttctcgattcttgcattggagtgatcttgcttttaatctttcctttgattttggacttaaactttatttgtaaagttaatcgctcccttttaaattttataaaacctttccatttattttatgtaatctctaactttggctctaaattatatttcctttgaatccattcccgaacacctccaacaaataccctttcaattcccgttcaaccatctctagagcacatgaaatatcaatctctctagagttaatacctttttatttcgagcttaccacactaccaccaaatccagttttatcttccaccaaatacttctcctttgatctttacccaaacacatgaaataccaattcttatttttcctagaaccaatacctttcctttggatctccacctaaatattcctgtagtccataaaatatccttttaaatctccctgagtcaatatacctatcctttagaagtatatcaatctaccaccaattccgttcctgtagaaattcccatccacatatacttccaaatccagttctatactctaacaaatatttcccctttgaaatctcgttcatctaaattatccatttaagatttcaaagtctattattcaacttgggccaatatttgctcgattggtcgtcactttgttacacctcctcatcaatttttatcccttagactaaaccgatataatttcaaattttcctagaatttattctggatcaattccttgatctagacctatcattagaaatcgccattttttctcctttatacaacacctttcataaacccctttgacattcccaaaattctcctattctgattgagccgccaatttgattcctatggcttgatcatatccttggcacaaagaacaatatcatcaccaatattaaatgattgctcttgtgctaagaaatctagtttcattccctttcattcaaaaatccaaattccctttagccataacgaatccccagaaatctgtaccacataatgtcgggctgaagtccaatttatttaccaccatccatttttgccaccaatcctaaatttatccaaagttagaagttaaattattgcctttttgattatttttgtgacaagttttaaaaatttggttcttattgaattaaataaaattagagtattttgatccttattgaattcctttaaaattggaacatcttgatttttatccttttcaaaatttatatcttaaaataaatatttttgattttattttaagaatatttcaaactcctttttgctttaaaaactttatatttaaattctttttataaagttcaaaagaccccaaacttttctcttttaaattttatctcctttaaaatctatttaaagccttccattcaaaattcccctaattttcaattcctttgaatcctattcaaattccttgtccaagttcaaaaagtccacaatcatttatcctttagttttcatcgcctttgaattccaatcgaaatcctctagactcctattcattttgggccgaaattcctcatcaagttccgatgccactcgccccttcccgatgcgccgccactgacgccgtgccatgcctttcctcctccggcgcccaaccctacaacgactgccacatattcgtgccgctgtcatcgaccaatcggagcacagagccggcgccgtctccttcttttccacgttgccgtcgccgagttctccttgctttctgttgatgtgaaaacacgaggcctgggagatctgcttaactctagtgtaggtccaaaacttgcccttgggtgtatgagcgtgccagttgatttgatcctgtaatcaacaagaaacaaagacaaagaaaccatggttaaatccataaacgatagccaatcggctaggtgccgatgaaatatcatttatctttgagccgataccatatatgcatcgatcggcaatcattaataagtaaaaaagaaataaatctactcgatcagctgtagatattaacaatatataatctttatgtcgatatatatttaaatcaagtgattgggatagatcggttgccatgccgagacagtataaattacttagatcgaaatatatattaacaaacaagattatatatgttcatagcatagccgatcagatagatctagcatgtatcggctaatactccgataccactctatattaagatattaaagcaagtagaatataccaaacaaaaagcctaatatacttaaatgcaacaagatcttaacataaagggcagatttaacatgtcaataaaacatataatataagcttagttaaatcagataagatcggctgaaactccgatactaccctaatcggcaaccaaagacaggctagagattgagattctactaagatcaaactcaactgatacagctataagtatgaaaagaaggacaatatctagacaatcaagtcgtcggatgtttcatagggtggtagatatcttatataatctaagtcaacgtcggtatttagcctaatcggctgccttttgataacagatattagccgattataggttaaagagcgatattgccggagattgtataagatatacgataactcgccggattacataaataagattagagtatcatgaagatggaagcactaatcccgagaatgcaagccgccataacaagttttacctcttgttcaagatcgaaaccgatgcagcttaacccgaaagcaagaattcgtcgaaacaaaacgaaagtaaaaagggtggcgatgcaccgagattgtattgaacgtgtgttcatttgattacatggggctcggggtctatttatacgcaataattacaaaatatgtccatatcggacacgactcttatctctaacaaactctaagataccataagtctttgcggcagacttttgcccaaatatatcttcaagaaaattacataaaatatcctacaattgccttctcaggactctatccatgcgtggcaatcaccatgaagcacaccaacctaacctgacaacgtatgccgtgtcatattgtcagattcggctcaatcggctaaccctgtccgactcgaactctgccgatcctagtcgcagccgatttggacctcagccgatccttactctgtttctaggacgatctctatctcgaactccgtctcgactcctttttcacatccgatccttggattaccaaatttgctccttaacacattcctcctccgcaaccgccacaaaccaccgcctcttgttgcctataaaaggatgatgaggttcccccttccttccccacacaaccgagcttgagctctttcttctctctccaccgtgatcagccacaactcagccatcgatcgatctccctcaccagtgctccaccgaccaaacctttttaaaatttaattatcctttaatttctttaaatgcccttttctttattttgggtgaatagccagttcagtccttcaacttttgctcaagggtcaaattagtccttgatgttttataatgtccaaacaagaccctaaagattatcatgtggcttaatatagtccttagacccacttaaaacgccacgtggacatgccatgtcattcatgcatgtaagataacatttaaatgtccattttaaccttcaattttctatcaaataaagaaaagaaaaacaagaagaagcaatcataaaacaaagaaaaatgtcaatttttttagctatcaatgctacatatttttgccaatggtcaaaaccggacctttaaatattgaatttgcatgcatagatgatgtggcatatacacatggcatgtttagagggtctaagaactatattgaatcacacaatgaacttaaggtacttgtttggacaatacgaaatgtcagggactaaattgatccttacgcgaaagagtcaagggatcattttgggtattcacccctttattttaaaataccattttaaattttattttttaatctattttaaaacccccttttgaattcaaatttctttgatttatttaaataccccttttatttctaaaccattcctattttatcccttagccacaaaatagtcgtcgtggaaactttacgcttaccatggagacgctcgcgtggtcttaaaccccgacgtcaaaccgttggtcgtaaaacccggcataacctaatcctaaggttgaagtgttactcttcgcgccccacgcctcgatgcgtacagtggtagaatcctcattactccctcggcctccacagcacgccacacactagctttcaggctctgtgtgatcctagccggtctgctgccactcacggcaatggagtaacaatttccatcctgcaaacccacagaaattttctcaactctctagtcactgtgctgcttaattgtagcatcgactagacgagccaaatatctagccggcatgctacccaaccttagcatcggctaaccaacccagataattagccgttatgctaccatccatagaatcggctaaccgatccaaatatctagccgtagtgctgccctattctagcaccgactagaaaccaaatccaccaaataaactccacctacccattttatcctttccctcaattccaacgtttagaaaccaaaacctctcttttgttttccaaactaaaatctattctgaaccattcctttctcctctcaccttgctccaattttatttattccttggctttatcgtttctttgtagcaatttgcttataggctttatttgctatcttttcgtatccgtaagttagaccgtacaacaagttctatcaacatccaaggagctgacatggacccagatagctacgctgaagccgcggaaaatcatatggcgcaaggcaagacataactaaaattttgatcatatagcaactttcatataatcttcatatttaaatttgatgcatgatatttactcttgtaacatctcatgggcagatgttatatttcataataacattgtggtggtttaaaatgatatttaatgcttttaagcattgttatatgagattatggaaagatacattggacatcattgtatgtggtttattattcagacatctttacaaatttaggaatccggttaaaatgggcatttttgaatgatatatatatatgatgaagtttgttggtgtggggagtttggaaaatttttggtggtttaaccggattataattacccccttataccgtggaaatgacatagttgcgttcatccacacgatcaagtaattggacttagcctagtacattgtcccactatatgaaatactgttggttggctcactaggagcaggattggggtgaacgcatgtataaggaggttgggggcatggttcacaacggtggaacccgtgaaagcagcgaccaagtagctagccttgcctaggcttggcaagtgcccgactgctaggacggatcaataactagtaactagtagtaagtgggaccttcgaacggctctgttgttctcaacctagctagctgtgggcattgtgtgggtaaagctggacagtctctacagaggtgaattaaattattcgaatgtgctgtactcccggttttggagttgtgtcattagggtgattcctactcctgaagtataagtagttttaaaattaaaatgttaaggataaagaagatttatggtttttattattcccttactttatcattattttatttattcatatctcttcacaagtactcacccttgcataatttgacatatagaggaaatgtgctaacaacgagatcagaaggaagcaaggtctacgacaacgacgagtttatctaggctagtatacactcgagcttttgcctgtagagttctttggaattctttggagtttattagttgtagttttagtagttgaagagtttaggagtgtagtactttggattttcttgtatttcaaataaggatatattagtttggatcttttcaccctttaacagttgtataattagattttcttgtatttcaaataaggatatattagtttggacgatcacgagtggatttttggggcaccaagcctaaattgggtttccccacatacttggtattagagctcagcttgactgtaggctgacctagattggttagaataaaacataaggacaaacttaggcttaaaattttgcttaacatatataggaattagtttactccccactattagacgactgtcgagttgaattgcttcttaaatttgatttttgttatgaaaaatgttgtttgtattgcgaaaatttgcatttttcttctagattttactagtttttgtaaaattttatgaaaaaccgttgcaagtttgactgttaagggcagaaattgagatatcagatggtgaggattttggctcatattcttgcaacccttggaataaattgcaatattcaagtgaagatttcttgagcaatatacatatgcaatactacaagtgtctgaattttagaagaatctgttgaacataaatggttagactgccagaagattaaatcatctatatttcatggagcaacaaaacctctcaaagctattggctggatccgtaatattggaaagatattaaatacggtctagagtaatgaccgtgaaaggggaccttatgcatttcatagaaaatgcatatgcttgttggacaaattatgaagctattcagagtgaccagaattctattacatgaattcaatacaaaagggaatgagaacacacaagaggaccattaaaataattcaaccaaacgaaagtttcataagaggtctaacattttgcttattttcctatggaattagtcataggatttctcgatgttttatatcggctcgaataaaggggtagcacactgtagatattttatacgatcatagataaatctataagcgcatgaataccactacagcatttcacatggaagtattccaagggtatcgtatttgtttttccactgggaaggcggcaatgtaaagagttggttcatatagtcgtaatcatgatgtaattaatataccatagcctaaacagggataaatgatgtaataataatgtatgggtagtattttacacaaaggagattcatctctaataataatacacgagatagtgaagaaagacaaaagagacctaaggttcatatgcagttctatatttatggtgtttagactacacttaacaaatacatgcttacaaggctagaactaagttctagccgctcaggcactgctgaaagacaactccctacaggtctatcagtttggttatggcattttacgaactcttacatcatacctggacatgaaggaatacaaatggtaaatagtgctgtcaccacctgccacctacctcatttttcgtgaggtatacccacatccaacgacatttaattaatctaaccaccatgctcacattaaaaaataatggcactaattccccccagtactcccatcgttcggatggacaagttagaactagtacaacccgttaagatcattggaccgatatcgtggcatatatcgactagcctaatcaagtggagcatataattgaagtacagattatacataactaataaagtagtctatgtattataaacactaataagtaaagaagataatttctttgttactcagtcttacaagaaaagtaaaatactagagacatacccgaatctctgagaagactttgaaaccgaagactactctaaacctaactgcactactactagagagaatacaactataggaatgagagaattgttcctttagtgtgtgttgcgagagtgaggaagcgttcttttttttatagctgctaatgatgcttagaaagggcagtatttctcacaaccgtcattgggagcttcatcaggaatgtccatgtgtaaggtggcaatgtgatgagccagaggtggttccgctgaacaaggggttcggccgaccaaaggtccctacctcttgctaccgaccttcaccatgggctgccatgtgggcccctacggtggtgcgcagtggcttggcctcgctggtacgtattttggtt

SEQ ID NO: 51413 - DNA, 510 bp, Oryza sativa
cgccgcctgcctcgctcgctcgttctcgacatgaacttgagggggatagacgttgaggcagcggaagagggacggagcaagcgtccgcgtgtagtggtcggcaaggacgggcgggtaggatggcgagctcgagctcgccggctcccctcccctctccctctccaatctcggatcttcctcttcctctcggctctccctcgtcctcacgacggagcgacggcaggccgtgggcagagcggaggggcgggcggcgacctcgccaaggatgccgcgcgcacctccgacgcgagaggagcggcggcgcgcgccggccggtgggagggagggagaggagcggcggtgcgtttgggtcagcggctggcgggagggtgagagaggaacggcggtgcgcggctgccggcgggagagggtcggcggcgcaagccgactgacgggtgggagggagagaagcggcggcacgcaccgcgccggcggagagggcggccgacgggaggggggaagggcgggccg

SEQ ID NO: 51414 - DNA, 4080 bp, Oryza sativa
  unsure (1)..(4080): unsure at all n locations
tgttccttaacaccgtccccaccttcatagcagcctctcccgcccgctaccgccaccgctcccgcccgttaccgccaccgctccctaccgccatccccaccgaagagaaaggccgagggagagagagagataagggagggagagggaggaaggaggaagaagggaaggagagggaggatgacatgtgggtcccacaagtcagttggtcccgcaatgctttatttgtgtgaatgacatgtaggtcccacatattcctttttattttttgttcttattctaatgccacgtaagcgtcacgtgggacaaagactcggtcaagaccgccacgtcggcgccatgtcctccaaaaccacacagggtcattttttgcatcggttttgatagttagaggagtcgatatacccggttttgtgttggaggacataaatcatactcgagtgatagttgagggagtcaaagtatactttttcctaccaactctcatcgccataaggagctggaagaagatttttgcggcacttgagtttgaaaaggtgaaggctaaatatgcatagggtgtaccttagtcacagtttggctggaataaatacccacctgtactgtggacaatatcatttgttcctgccaatgttttaaatagcaggataaggcatttagcggttagcttctcaaacagctatagtgggctaaatggtgctataacggctaaattgtacatgagagcaaatagctagaactcttctcaaacagctatagcgggggatttaaaaccctggttcctgctatggaaacccttgtgttactgaaaaaaaattgccttgtataccctttgggcaaacaagcaaacatcactgttaaaatggtggtgactttgtgctgctatgtcttgctgtaaaaataaagttttatatctcgatcatcaatcaggtttgcatgcagttgtcctccttgaagaaataaaatggtagggtttgcccattggaaaagcctgcatgtcctgctacaagcagcacttcagtttgcccgattgaacacaataacactccctgtttgagtgtggacactaatacccatcctatgtgatgctattttgcttccccttttcttgtttggattaagtctacataacccccaacctattgttaggagattacttaacctcctcaccttacaaactaggtatttaaccccctaatcttactaaaaccgtttaattaaccccttatggtggttttgctccctggttttgccttgctggcatgccatgttggacagatggattaacaggcatgctgtgagggtcacttgattttctccggcaaagccttgtcctctatccctctatttacattgaaaatctgtaccatttttatggttcctgacattgccattgaagttggaattgcatacaagtgcaagaattcagtagcacgaacaaaataagaggcggaatataaatttttagacaaaccatttacacacacaaatatgctccacaatctttcatgaaacaagtagaaaaaaaactaagtagcaatcaggtctgacaaaacagggtagcaagtgtctctcacaaaacaagagacatgtagtaggatgcatttaattcctgataaaaaagacaaatatctcatctttccccaacacacatctttggttatagttccatatgatggagtaaaacagtaggtgggcaagtctcgaagtgtttcaagctggtctagccctcttcctgcacttctgttgcacaagtggaacagagcttggagtagcaacacttggaggcagagagcttctgctaatgctctgttgggtgcccacatcaccctacaagatgaaaaaaaacatactttagataggttaagccaatgagcaaaacaatagaaaatctgagaataacaattttataagaccatggtgaatgaggtagcagcagcagaccccactttgcttccgttttcttgtagcatccctcctgatataaccattcttcttactcccagcttctttattccgagcacaggtccggctgttatgagtagtttggtggcacaatttacatctcatcttgatgccaaccttgcttagcttagctcccttaggtttctcagttggctctcttgttctctgagttttgggcctcctgagcattttaacataagcaagtggatgtggctttggcatgtcagaaactggccatttgtccttcccttcaactggctacaagcaatgttggtatgtcttcatgtactctaagatagagaaacttgatgctatgtagtcatccaattgttttgatgccttgtatattgcactgatagcatgacaacatggtagtcctgatagttgccaataactgcagctgcatgttttctgttctaagttgatcgtgtacttcctcttctctttctcttgaacctcaaatccatgctgtccatttcacaacacataacactggccagatctctcaatgttgactttcagcttcttgaatatgtttgggcatattgtaccttgccacttatctgcctttgtcctcattcatagagatgactgganagaaccttgaatccatgatagagttgttgaaagactcacacatgttgttattaacggattcacaattggaccctagctgaaagaatgccctctccaatgttcaagtgcggtggtcatcatgtccttagctccttgaggggtgtcttgtgctagctttgctctattgtagttgaaaagctccctacaagatgactttgtacagttccaaaactttttctgaagcttctgattagtgtaccttttcctccagtttgcatatatatgccttgcacatatcctatgttctactctagggataagctcagccgctgcccttaagagtccctacaagacaaaattcaaaatatttattacaacttatgacccattgcacattttgttaaaagataaacagttaaaaagcatatcttttgctggtcagaaattatcacccatccttcacctccatcatttatattgagatctttttgtagcaacccaataaaccaatacatcaagttgttcagcttgagatcaagtttgcatcatcaagtatctctacagcctggttgctatgcactcctagcttccttgccctgatgtttctcttgatttcctttgcaaatttccaaagttgttcagcttcctcatcattatcagagctattttgctctataggctgcctataatcagagtctgaactatcagatacttgcccttcagggttgctcttattttcaggcccatctacatctttaggcttctctagaatttgagatgatgctcttcttggtttcaattttcccttcttatctgtacatagaacaacagtaagatgtagctctgcctctgaatctgatttcgcttcatcgttagcttctgccatgtcatagccccaatcagcaatctaattatcatcttgcccctcatcaattgctatatgctcaacataaatttctgcaacttgaccattattagacatatgatttgccatttctatgcaagcattgtcatcaagcaaaaaccttagcccatctgacaactgctttccaggatacagccaatgcaagtgtaataaaccactaactggcatgtggtcaccgaagaaacctataatctcaggtaaagatatcttgtcaagctctatgtatgacaatgcagtacgctctgccacataatgcaattgccccctagaaaacatgaattccccactatagtgaaacctgaccggaagaaaatccgatggatccattcctgcaaaaataagaaaaaaaattaatcctaacttttgatgagattaaattactacaaccaccaagatcgtacagtatatattatttgaggtttctagcctccgttattcttaaaaaaaaaagcaagatcatacacaaacaaagcaaatttatgtgtcctctggtaccaacataggagcaaatttctgtgttcataagccctaaaccccaaaatcatcaagcagtaaaattaccgagaaattcacaaaaagtgatgagaatttaactgcctacaatatagcactatcca

SEQ ID NO: 51415 - DNA, 640 bp, Oryza sativa
attcctgcagcccagcaaatattggagctagattacttgaagttcaaagtcccgttgtttcgttgtcgatgggtcgatcttcgcaatgtaaaagttgacaatgaaggtttcaccactgtcaacttggctaacaacgcgtacaaggatgaaccgttcgttctcgccaaacaagttgttcaagtgttctacatagttgacccgtgtaacaagaaactacatgttgttcgtgaagggaaaaggagaattgttggattggacaatattgcagacgaggatgattacaaccagcacgtccacggcataggtcaagaaatacccctagaagaggaggaagaagaagatgaagttcaatatgcacgcgtcgaccatgaggaaggattatttttgtaatttatgtacatagtttatgtctacatgctgttatctgtatgattctaatatgttcgcaatgatcgacagtatattgcttatgaaatagtcaaataaaataattaagtgaagcacccactagaagtgaaataaaataattaagcaagtataaccattggaaataaaataataaaattagtaaaataatgtagtgcaattactactgttagtgaaataaaataattaagtataacaaaatatgtagtgtatg

SEQ ID NO: 51416 - DNA, 2626 bp, Oryza sativa
gtatgccatatggaatgtccatcaaccacgtgcatcaactctagcctaagtatcccgcatgatctctgaccaccacggacgtcatcttatccccaagccgactcccggtccatcaccgcaaatactctcccgagacatcgagtcacctacacatgaaataaacaaagaaaccatattctgagaccaagctatctccaacttgactcattagtagcaaacaacagtattacatacgtataggatccatctagaaatcataatcatgaaataatcacggatatccaaacaaacaacctgaaaccgaaaccgacacagcgtcggccggtcagaccgtgggctggccggtctgaccgctcgatcaccgccggtctgactggcatacacaactcggtctgaccggtcacataaaatgatagaatcctacgatcacctgtgaatccaatcatctccaaaaccacttcgtgaataaattccaaataacaaaaccaatagtctccaatgcccaattgttcatcacagaataataatcaaaaacacctttgattttacaattattttatgtaaggaaatctccttgggagccttgctcaaatgtatgcaatgaagatccagattgttgaacctgtatcaatctactaatccaggaattgatacagttaaaacatgtcggttaccgaatcattagttttgggacccgacaggatttcgggccagatttagcccaaagagagggagaggattatttgtaggttgttttattttaataatctctgaaattggtttttgttgctttaatactatttagggtgctcgagggaccaatttagagcatgaaaaatttaagaaaaataatccaagccacattcgattttttttcttccctgtattttagtgtttgagatttcttttaagcttttaattatttatattattccctttagaaagtgattatatgattttatcaggacgttgcaaatccaatcccttacaagaatctcaccaccgagattcgaaagtgctagcaagaaggtaggtgtgggtgtcatcttcacttcttatgtagctttccctttcatctgaccaatctgataaaatcttccaagagaactgtttgattggtgagatttttcttcatggcatttctctagcaccaagttgacttcacaattttggaaaagttctgacgtcttcttgatctatccaagctaagcttatatctgagttgccggtacttagagacgccgctttcattatgaggttgttaactttggtacatacatctttaactgaaaacaatattttcttatgtcttgatgtcgatgtgatcttattgtagcttcgcattggctttcttatatttcaatgtttcctggccttgtgatgtggtatatttttagattagttgatgttgaagatgaaggttctatgtatcttggaaacaaatactcctcaagggaataactattcttgctgatttagtctggcatatttaccacctgtcttaaagattaccgccaactggcttgtggttgttgtgatctgtttatcttgtcggcctgatgcttcaccattggatctgtagcaaggagttcctctatattgtcgcatgtagattactttggagtagacacttaacatagcttgaaatggatacaactcgggttcaatatcttaacatacaaattaatgtctgctcttctctgtgggtctcaattatcggaatgcaccttatcctttcatataccccaaccttgatgtgactctttcattggatatatctgccagtgtgatatatggtatgatctactccctagttatcctttatcaatcacctttctgcctatccctttcttagatggtgtgaagcaaatcttctgtttcatcgcctttcaaagaaaacttgaaatggttcatcaaaagctatatcgaatgccttgtgaaaatgatagcactctgagtgggtttacaccactagggttttgatgcaacttacgaacttcactttcacttatcctgtcttactataaagttataacccactaactcctaaagcttaatatgcaaagaagccacatcatcatccactaataatcattaaatttaaatatcatgtaaacatgctataatatctataattttataatttattaaattttagagcttttaaaatgcaagcatgttaaatcatgatcccacataattcacataatatttcaatatatatcttcattattttttttatgatatttctctcttttcttattaagtcatatcacatcaattatttttagtgcttaaatgattaatctatggttcaaattatctctctacctttcttctcattaattcatatcacctcaattatttttagcctttagatgattaatctatggtccaaactatctcaatatttttctacttttataaagtcatatcaccttacctttacatttgaattatcattctatatactatttaaatttaaattatcatgaatcatgttaacataagtaatcttatgtgtctagctatcttacacattatttttattcatttttattcattgttagagagtcatgatggacggtcactaatacaaaaatgattttccatggcgtcaccctat

SEQ ID NO: 51417 - DNA, 646 bp, Oryza sativa
ttttttttaaaagaccttagcaggggaggcccccgctgttagaaaaactttattaagaaaacaagaacaaagttacaacccattaatccaacttatgattacatcgtgatatctcgcacaaattctaaacaatagaagggagaggtcacccttaaagagtggcctccaagggatgaaagaagggatctttggctaaaaaatgaacccatttctttgtttccttttttgccaagcaacataaaggaatttctccatgaaacagctcccctgataatccaatttagcccttataaacattgcttccaacgacagagtagtatcccatgtaatgcctagaagactccaacatttttgggcaaacgggcataaaaggaacagatgcatgaggtcttcaacagctgccgattgacaaagaacacaagaaacatctcaatccggaggagcacatttcttatgatccagcatgaacttggtgtttaatctattcatcatgagtagccacccaaaaacctgctttgcacttccataaccatagaaaatgaactggtggcttaataactctgaaattcagggcatagaatttttgtgaagaatatttcatatttccccaaatgtaagaccaaacatagaaaatgagctgcatcgg

SEQ ID NO: 51418 - DNA, 1021 bp, Oryza sativa
attcctgcagccctttggattttcgagcacgatgtgtacgtttgtatgaagtgtgttttttaccacttgtgttttttatttttccaaacaccaaaacatttttgacgggtttgcccatgtgttcatcaaggaggagattgtaaaatcaaaggtgtttttgattattattctgtgatgaacaattgggcattggagatcattggttttgttatttggaatttattcacgaagtggttttggagatgattggattcacaggtgatcgtaggattctatcattttatgtgaccggtcaaaccgggctgtgtatgcctgtcagaccggcggtgatcgagcggtcggatcggccagcccacggtctgaccggccgacgctgtgtcggtttcggtttcgggttgtttatttggatatccgtgattatttcatgattatgacttctagatggatactatacgtatgtaatactgttgtttgctactaatgagtcaaattggatatagcttggtctcggaatatggtttctttatttatttcatgtgtaggtgactcgatgtctcgggagagtatttgcggtgatggaccgggagtcggcttgcggataagacgacgtccgtagtggtcagagatcatgcgggatacttaggctagagttgatgcacgtggttgatggacattccatatggcatacgatggaggtattgtgtgcgtatgggatgcagagtcgaatttggaaggagtccaaatttggtacgattggttatgtaaagttttcttgtactagagggtttcctaaggtgtttaggactcttagtatgagtttggttcgtggctttaggctgcctacctcgggtataaatagagggggaccgtgaggcttcccggtatcgctttaaagagcaattgaattgagttttgagttagggtttcgagtttagtcgaaatttttgtaaggagtactgttggtgcactttgtaaacacagagagaatccataaagtcgtcatctactttaagagttcttc

SEQ ID NO: 51419 - DNA, 2388 bp, Oryza sativa
ccaaggcccataccttttttggccccccagaaaatcccctctttggatgggcacccacatgcccctgtcaaggaggggggcagcaatggttcaatgattttattcatccccagccatccacgggatcggagaaaacgggctgcacgaattgcatgtacgttgtatgaaccaaacgagttggttatcaaaagtcttcggtcttaatttattgagtggctgaaatagtttttatcccagtagatcccatgaaacatatagggtgaagatacttttatttagaagtttaggaacacctgcaagtattcatgtgtgttaattaagccaagagttgacccctgatctcttaaacaaaatatgctgctatataatgcacgctagctgcaataccagttcacacacgtacggacacattattgaggaactatcgaaatggaatctttccgttggatattaaaaacagtgaatgaacacctaattttacatagatagtacacagaaggaattaatcataaaaatatgaacatacaaagatagtggacaaaaatatgaacatctggctagtaacaactacactttttttttaaaataactgaaaacatacttttgtcatacaacacacataaaaaacacttttgtcatatatatggcacatagacaattatataaatagtcgtgcaattagttaattaactacctacacagaaattctagtatattcttcaatacgtacaacacaatattcaggagattatttctaatgcagaatatatatataaaagaaaaattctaaataccctcctaaactttgattggaagtccatctagcagactgaactttatatatacaccttaaattgtacaatatcgttcatattactctataaggtggttttcgcaaagtgatctttacctaatttgcatttatgttgggtgggtttgactaagtgacatatgaattggacatatatgctaaaatctccatctaaatgtttcatttttactctattttttgctctcacttacaaaggaatgtcaatacatacttgtatgacattacaatagagtataaatgagtgaccagtgattgatgatatgtaaacatgctatattaataatttaaaacctctcagcatgcaaacttccaaatacacaaaaccaccttagggagcaatataaatggttttgaaaagtttaggtggttaggtgtgtggttttaaagttttagtgtgctagcttagacgaactcctatccaaagtttagggatatatggacctttaacctagaaaatttaatattaaaatcatatatttatctgtattcacgatttaacgaaaaggtaattactacaagaatccagaattttcttggctgccaaaaactgccaaggcaatatattttgatggccgaacgccaagtctagagtgatagggaaattcagatttcttggctgctaaccgtgagggaaagttttattggtggtctaactgccaagaaaactatgaaggatatcaaactttcgaaaagccaataaatgtaaccttgacggctattttttgaccaacgaaaaaatcaggtggcgccaagaaaatcccggaatcttgtaattgaataaaaatccgtcaattatagatacaacatagcaaaaaaaatagtagaaaaatatgattgaatatactaacatgcagattgtacacacacataactaaggtataggttttctttttgtccagactagccaattttgacttagaaagaactgtaattgcacctcttttctagtctagatagtggtgtacaggttcacatatgaagttaattactcaagaatatttcaacaagtagttcaccgaaggacgcatatttaaaaagttcattacttttttaaacgttacttaatattttatgcttaagacaagatttgattatattttataactttgaacatcaaaagcttctcaaatacttagttttaaaggaaaatatgtggtatgtatagatttgcgtggaaaagaataattataatatcataaaattattgttttatgaacttatttgacacaaaattgactaccaaagtttgatttcaaaatttttgactactttttatcctaaacgtcaaatattatgactagatggggtcttgcaacgacgctagcttgaaactggatatgattacattatatggccttggtcagtaaaacatttgacattatttctcttattatatcttaccttttcagtgagaaatagatttttggaagtgcacagaaccatggaaccaatatttttttttaaaaaaaaagacaaagaaagttaatgtattccttccgtttcataatgtaagactttctagcattgcacacatacatatatatgttaatgaatct

SEQ ID NO: 51420 - DNA, 1584 bp, Oryza sativa
accccacttattttatatgtcccactatagttgtgtgactagcttaccagagaatgatgtgggtttaatgttcatgcgaatgattgctctatgacattgcagaggatatagagtaatattgatacgccccgaccaagaccattcatacatagtgtgattgttgcgcatcaatgcaaggctaaagctatgcttaactccaaatcttattgtgttcatcacgaaaggctgctacttggcttgtacgattgtaggttacagcatattgttgtacttaaagagagagacttgactcggattaccaacactacaccaaggcatcgtaatcgtgcaccaccgttgctatcatatgaacgtaaaccatcaattggactagtgctaccatctcaaggaccgactacaccaagtcgtgtggttactcccatcactaagagatcatgccaagcatggatggagtactcaacatcattcaataaaaacacgacaaaaggttaattcgtttcttgctgaatttaactttagtattgatgtgaattttatactatctaaatggtgtatatttgatttgctaatgttcataccaaaggagatggacactactacaaatatcaacgactacatcaataccaataaagattacacagaagatgaagtgacatttgctcaagtggagatggtttacgacaacgagcagaccggttatgtgcagatgctataacttctaagggatgtgcgactcagccatcaaattcctccatgcataatatatatggttggaaagataatcaagtctagtttcacctccaacaaacggctagtcgtctcgacttcccatgagagagtaatatatatttttgtggaggctgcatagaagctgaaaggctctagcgaacctgctcgggaatgactcatggaaacccttgagctagccatatttatccccatctaggaggattgttcctattataaatatcccctatgttttatcatttgaaagacttttgacaataagaatatgaacccctttgtttagctgtgtgctagcaaattcagagatagatctctacgcctttgctcttgtgatttccatgttagattacagaagcggcgttcgacgccccccaattggtgcttctggtcccttcgacgtttttccttgattgattccaggttgtgttggttggtaacttagagtgtggttggacgaaccctcgattcaggttgtcgtaatagagatggtggttggcttcgagtacgatcgtcaggttgcactgttatctttgttgctcgcaactagttatcttgttttcgttgaggctagttatcaattcttgatcctatgccgtaaagatcgggacatcacccctaccggggtcgtatcaaatatttaataatgtaaacgtggtgcttatatcattaagtatcattatttgggtatatatgctgcgggacagtagaggtgggccgctgatggtgacagctcagtacggttattcctccacgttattcctaagacactttcccagggtgggtactcctccgtatttgatcccggttggatggctatgacgggttgtcgtaaggaac

SEQ ID NO: 51421 - DNA, 794 bp, Oryza sativa
atatttcttttcccacaaaccctaggttattaaataagagaatctgagttcttcttacttcgtgtcactctatccagtacaaatgaattaacccctacttagactttgatgtatactggtaatatataaattattagcatagttctctcttataaatcttctattgggattaaatacatatgatacattggaatacttccgggtgaaatgctaaaatggtatatccgtgtgcttgcggattacatctgtaaccattaatataccaggattatttatgcatcattgctgggaatcatattaccagtagtgtcgttaagaaatacaaacaattcacaaactgattgtggttccccggttttgtacaccggaaaccccatatgtcttacaatatcactccctggatcagtaggtggtacacacatggcatagtcgaatatcacaagctgacatcgttttataggtattgtactacattaataatacaagggttactcaactaggaccccaaataaaccgagcatggtcatgcacattacaaaataccaaatggaatatagataaaatagctgaagcgaagcagcaaaggtccatcaaattccataggcattgactggtgaacctagatccctattcctttgtcttcgacacgttttcaacagcatagcatgcatatggtcgactccaactcctttctaaaagttttaaattaagtaagggtgagtacgaacgtactcagcaagccccccctacagaatgcatctagtgcacacaggggttcaaggatggctgggttt

SEQ ID NO: 51422 - DNA, 6042 bp, Oryza sativa
ttattctcgcattgcggcacccgctccaaggactatgagccccatcgcacccccggcacaccaaacctacctcgagccggaagtgaggggagtcctggcgctcccgggatcagggtatacacacacacacacacacacacacacacttatagggtgcattttaggtttttaccggtattttccaatcatcaacacttcaacaacaacatcatactcatacataacctaccatgactggggtgccaccccacaagaatttcctagtccatcgggtctacctatttgtaaaatgcggtcgtactcgattcgtttcctatatagcttcctgacttggtccttaactgaccaaggtcgacgactaaccctttctagaaccacccatattctgacgccttcaccaacgccgatctatagcggttgctcacgtgtgagcgctatcgtccgcccctctcaaatttcgttgttaacagcccccctcctctccgcgccaccgccatgttgccgaagaggaaaactaggaggctgggaagccttcgagctggaggttggaacctcctttgcgccgttgcccagttgcatgagaggacaaagaggaaagaaagaataggtgacatgtgaactaatggtttttcgtttttattccttttcatttacttgtgggttccacatgccacgtcataggtagatgaagtcaacacaccacatggttgcagtcagctgaaacctctattgaaatcacattaggactatatttagactggtttagtaagatgagtgacgcattatatctggtattatggtataggatatgatctgaacttgatgtcaagatgaaggatctcaagtgagcttattccaaataaaaacctttgcctgaagtcctgtgaaattcgtcctgtccaaacagggtaaattcttggggacggaatagatatagctaaacggaataagttcatttgaggtcccttaacttgtcaacgaatctgattttcgtccttcaatctaaaaaccaaatacaacgggtccctcaattatcaaaaccggtgcatatgaggttcctcggtggtttagatgacggttttagttgacggtttaaaaaggcaggatatttaaaatgatgtgtggggctagggggccccacaatttattattagagaaaatccatgaaatgccatttgcaaacaccctaatcccagaaataccatcgacaaagacaacttcccaaaaatgccattgcacaagcctctttctcctaaaaatgccatcaccgtcaactccacactgttacatccgttatttttttttataatgtccattctgccctcagtgcaaaatatactccctattttcactgtgaggaaaaatgctgagggaaaaagaaccctaacccaatcgatccggtgaggaggcacagcggttgctcggcgacgacggctaggtggtggtccacggtggtggagccgctatgccggcggtccacggggggccgcgcggcagggcaggcccagggcagcgttgcagagaggaggccaagggcggcggcacggcgagggggcctagggcgcggcgaggaggcccgcggtgccggcacggcagggagcggcgaggaggcccacggcgccggcgcggctgcgagcggcgaggaggcccacgatcgcggcgctgcagggcgcgtcgacgcggttcacgacggtgtggcggtcacagcctgcggcgcaggggccgtaggcgccggcgaggagggtaaatttgttttgcttcttttaatgaatttgaaatctgcaagagatgaactttgtgtgtggatagtaggttgattcagttgtccttgctgtttttgtgtgctttacttagaaattttaggtatccatgattcacaatcgagctgagggggtgatctatcttactgaactttcatgtgaaatagagatgatggagaagtatatgtttcaactgaacttgtctcggaggcgccagcgaggagggttattgatagctctatttttttctcatatcacaatcctgattattgataacaaaatttctgaaagaattgcaatggcaaaatgtgtgaaattagtttgtgaatttaattctgaaataatttgattgataacaaaataatgatgtctgtgaatttagttgtggacagaaatatgtatgaatgcaaaataatattgtgtgagcaaacaatacagaatgatgatgtgtgagcaaatggatgcctaggggtaagattgtctttttatacaacttaatggagaggacttaacagcacttatggtgtgatggcatttttgggagaaagaggcgtgtgcaatggtatttttgggaaattgtctttctcgatggcatttctgggattagggtgtttgtcaatggcatttcatggattttctcttattattattattgtgtgaaactgacatgtgggccctacgagttttttccggttctaattaccacataaacgccacgtcaacgccacgtgggacgatgacctagtcaaaggatccatgtagacatcacgtcagccaaaaccgaagatcaatgctgccgagggacattatttgcatggttttgaaagtggggttttgtaagtagagggatgttttgtctttcgtttccctgactgaagattaacaatagactgtgggacaagttgagggacctaaagtgaacctttatcctacctaaaataggcttttgctcccccctacttacaacacgtccggcccaacccaatggtttcacggcccacagcgaagggaccggccgccgtttcgtccgcccaggcgtcggccgcgtcgctgcgctctctcctcacgcgcgcagacatcgacgccaccaccccgccaccgcgcacgggggcggggaccggaacagcagccataagaggcaggtcgcgacaacccccaagcgccgtcgccgtcgagggcggccgacggctcccctgttcctttctgctccgttccaaagtggcgaaactaataaaacgaaaaaggtgagtcggtgtcaatccacctccgacaccacgccaccgcccgtccgtctttctttctcctgttccttgtccggggtggcgcaatgattcgcccggacacgccccgccctcggcgtccgttcccttaccgcgcaatgtagaaaccgtgcaggaatcaggtgccccttccggtttggagatggtgaaaaccgacgagaaccgggctgctttctcggtgtcgtatggtggccgtttgttgccttgctgccggtggggcgtgaggtgaggtctgtcaactactcactacgggggaaagggggagggtgaagtcgttggaaatttggtcggcagggtgaattcgtccccagtttaatctgttagattttgtttttaccgaacggtagaaagaaactgttatttctctttcttgcttattattagttattatcattactatcccaaaatgagccgactggttattctgatctaactaggtcgattgtttttaatgattgcatatggtgtggtctagaccattgatcggcattcttaccctgctggttagctttatcggtaagggcacccgcaatggttatctatatgctatctacaagagattcatgtcagcatattttcctacatggaagagattaaatgaagagagagagcaaagctatctactaacctggagatagtctatagagaaaaacgagacaatagattagagagctatagatacccatataaacatactattgaggcgatttactattaatctagtctattgttgagatgtacatgttttatagagagcaccttattttatcattatgggtgccctaagcaaatattgtgacagaaactggttggagttgttacgttgtattcatttggatcacatgtttcaagaccctagcgttgttactgtaacatttactacagtatggaagtgatcttacgtcttataggctggcatttttatgtatgaatcaacacactccagacttgtagcaggtggctgtagcatgaagtagtcttacataaatcccttctttagtaatatatctcttttacactgtattttttcacagaaaagggccaaaaccaaggaggggctcatacagttctccttttttttttttgaacgggcttatacagttttgacacaaacaggattccccaaaaaaatatttgtgttgataaatagaataatagataagattagagtagcattatgctgcactggtaaaaatacatctgagcaactgtagtgtgtgcattttattagctttaaagaactaaaactacagttcattcttgtatttgtacaagtcagaatcaattgttctgtggatttcttatccaacacgactttggctgctgggatgcgtgtgtattccagattacacagttatatgattctaaatagcacattgttttggtgaccttgcagcttagtagttgtaataatagagacttataactcttgcagtatgttgtgctcgccaggttgaaacacctgccaaacctgttatgggactttcaactccatggtctgagtgcagcagtgcgacacacacttcactttacaaatattatctgtatagtaatcttgatctatcttaaagttgtcctcgtgatcttacacaatgtttggctcattagtaggtgatttttcattttattctccataaaacctataattactattattttcagagtcttccataaaaggcactaccaatgcttgggagggatgtattttactagatcacgagacgtaattacagtcacaagatatatttactacttcaagtgaatgtgtctacagtggcagtggcaaagtactataactctttcattacaaaatgaggagaggtgtcttggattcaggaaatgtactttatgtttatatggtaatagagatcagctatgtacttttatctttcttcaaaattgaaggtattagtccatcaattgacgagcaataaataaatttgcaagatggcaagtttggcaaccatttcttatggcttcaattttcaacatggaaggatcatgttggcaataatcttctggtcttctaacgacgcatcaattgaaattattaatttgaatggtaagtattggtttgcaggtaaatttctgttgacatacatttttgtatgaaatggaccctccgtcccaaaaaaaaaaaacccaatcacaagttcgaatctagacatagtatttgttcagattcaaacttaggattaggttctttttggaacagagaaagtatggttcagtattacttagtctatcggcacacagcaattcaaaattgttgctgacatgccagttacaagtactgtgacttcaaatccacctgtgatttgaaactattgcaaatatgcatcctttgttcagaattttgtctaattatgtgactgcagtttgaagaatattgagaacaaaaactgctacaatgtttatttctttcattcagttgttttattttgccataactagtattttggaacagtaaagattctttttcccctttttttataaatgtgtactttcttcaatagaacagttctttctgttgtgaaaaaagaagaaattttgctactttcaacatttaaacctttaattgtttgttgtttctaaattgaacagaaacagttaagtattgttggaattcaagaggtgtttgaaacatgtcaatcataactgtgcaggactatttccatcaagagaggatgaagctatgccatataattgataccactatttggttactaaggcaggaaaccttcatcaagccctatattatacttccctttatccaagttaaaggttgtgttcctacttcctggttctactgaacttcactggagcctgaaatcatggcatacttatttctgtatctcaaagcaaatgttgcacatgaaattttgaagttgacatcactaaaatgctcaaactgggttccttctttcgtttttaccatcagatgaccagcgtaacttacaacagagactttctgtcactgtgtataagatatttagatttct

SEQ ID NO: 51423 - DNA, 2124 bp, Oryza sativa
cggtgcacgccggcgagcgggatggaatagtctacgagcgacggcgcaacacagagtaggaggcaaaccctaaactgatttcgcgtatgttgcgtgaaggcggcggcttggtttatacagagataggtcgcttgatcagggcgcccgcaagatctccactccgcataaccgaaccagataagtcgcgcgtaacttatccggactccacgccgttttcacgaaccggattttttggaatgtttccaaaacaaaacaaatccgaatttcccgtagcaaaataaaactgcaaaaggagacttgcatttgcagaccattcgacgcgtaacatcgtgcatgcgcgccgcctgccaggcgaggcgaggcgaggcgagcgcgtgtgttcccctcttctctccaccatacacgcttcaagtggctaggagggcatccttgtttttaaggaggtccccctctcctagaataagcaagatggtactaaactccacatgcatgctatcttatgaggtgggcttttgtgatttttctaagaattaatcttagaatgtgccttatcccatctattaattccaacaatatgcaacggcaaagccagctcccagctgatcaggcggctgctcaagctccgccactggcatcaatactgccaattggcagaaactcctataaaagttgtcagcagctaagaaatgctctacatcgaccgggcttaagagtgctgccggccctgcgactgttcatatggtataacctatgcctttggttttctgattagtggattctgcatgtgtaggtacccacagtagatggaaagtcactgataaatgcatgcctatgggtgatccagccaagaggtatcaacaaaataaaaaaaacattaattattcagatcagcacgaatctgatttcaaatcaattcaagaaggaatgtagtaatgtcttggttttttctttctgcataacaagtttgaagttcaatattttaaatttgacataacatcactactgagaaccggtgcctaaaacctggaagtctggaacaatataggtgagctgggtgaataagatttgattttttttccttgcttacatttgataaaaagaaattgaagtaagtagatctgatatactatgaagtttattggaatatggagtgtgcagatgtaagtcacatcacactgatcttattgtgtgtaatgagtaatgagacaagatatctaaacatggtttccactgttggacttcaagcttggatctctctttgtgcaaaattaaatggcataccaaatgtgtgatctgaagtttggttaatacagtacattttgggattggttgggtcgaatcaacccaaccacaattgtccagcatgagccatgttaaacacctgggtccagctaggccagatattcacaaaaaagaaatacttcctccgttcacaatgtaagtcattctagcatttcccatattcatattgatgatatgtctagaatcattagcatcaatataaatgtaggaaatgttagaatgactttaattgtaaaacggagggagtagtaaactcttgggcatttcttaagtctgccaatagtggctgtggaaaagtaaagctgtaaaactgaaccgcatcggaaaccagtcctctgacaacccaatcgctcacatccccacaaaaaagtggagaaaatagagctgcataatcttttcctgttggaatttagttcattaaaattgtatctagctagaaatcgcatttccatgttgattttatggattgtgccaagcatgtccaaccaaacaatatttgtttgattcctggctacccagttcggttattttgcatgtttaccatgctaaacattagtaaactaaagtaagaactagtttatccaagtgtttcttttttcagcacttatagcaaagtaaggacatgtacactataagccacggtagaagtagcctcatgtagaccataccgtctaaggacacacataggaaactttacccccaatagaggatacttttcaaagggttcttacaaatttttagagtattatatgaagatactgcagtccacaacaggtgtcccagcccacaaagttactaatgttgttttccccttctaccccc

SEQ ID NO: 51424 - DNA, 2084 bp, Oryza sativa
ccaccacctcgccgccaccggttcctccccaccgctgtgggtctcctgcctcctcccagcgacgaggctgagggtggaaatgggaatttctgatgggagccgtgttcatgaaccacaacgtcaccaacgccgatcctaactccgtggctcgacgaaatggaccaaggagcggagggaggcgcgtgcctcgcagagttgtcacgcccctctgccgggagatggctccgacccaaaaagagacgtccggtcagcggtgtgagtaggggcatgggccaggagtacccattgtacatgggctaataaaaatgcagcagtcgaattccatgacatcgtcacttttagatttgttgtccccatggccttatttcgtaatgccttatttaaatctttttactcttgcgttgagttctttttagagcactttggaagctatgaatgtgtgtaactagtacgataaggtccttgacacacttttctttgttgatgttattgtttgaatagctgtcttgagaaaaagctgtgcggttgttgattcagattcatgtccatgtcgtaatagagcttttgtagtatttgaaatttagtcggcgaggcgtgagtgacagctgtttaaccagttggttttttacgttaacaggcgcactattgcatactgcagagcatgtgttagtgctacaagctggagggccccctcaagcttacacttgcgtccttgcccagctcaacccgttactttttggctcatccaatctcttgtccatacgcaggtacgttctgcaatacttatcctcataaagtctggtctttttttcttttatttggtttcaagtaatccacatgtgaacctcaatttgatgcctaaaacgagggttttccattggtccaacgggtttcccttttcttgtgatgaaagatacatacctaccattggtaggcgacgattgtgatgttagcatggtactggaccgtatgatctgtgtagcaatcggtgaaaggtttcatgggaaatatctgtataattttcctgaaggaattaatctgcatttttgtcacggcaagatattaccacacctaaccgtgactgttgaaacaacagcgcgaataagcatccgtaaagtagacaaatagtatgttgagccaagaaatcatttaccaccaccacctccctttgctctcgttaaaagagcatcgaacatgtagtatacactgcgctttcctgttttgctgaacagatatatacaacgttacgcaggcacgatgattcctccttcaaacacatttagcaccgaacagtcttgcctgtgtctgctgctatttcactaatcgtctcctgatgctgaaattcctgtccagatcggtgctctccccggtcttcttgtaaaacccctcgcgtcgatcgtcatatatattcggttttacagctagctgttgcagatgaggaaccgaacaaatgcagctcctgtagcacattccgattgttcgggcgtcgcgtggcagccagaatccatccacatcattgtgccttcatcatccactcatcaactctcatcagtcggaggcacacggcgctttgatttggcaagaacggctgaaaaaatgtgatgatatatctaccagttctctcgtttgtatacaatttcaaacgcaaaattgttgtgtgacgagccgtaccagggatggcacggcatcttttctgtgtgggtatgtatgtgccagtagaaacaggggctttggccggctaaagttttgccacctgatgaggcccctgttccggagccatttcggcactgtgggtcgagaaagaaagcgagcgtgggactcccgtcaaggaaaagctacgtacctgaaaaagtcccacggcaacggaccatgctaatcgtgaaactgccggccaccacccttatcattgcccacaggttgatgttgacgttgccctcctcttcttcacctcgatcggctactattgccccagctccctgaatcttgatccctctgatggagaacttcatcttcacacaaggaaaaaaataataaagaaactaggaactcgaattctccttgttgcatcaaccacctgaccgggg

SEQ ID NO: 51425 - DNA, 2340 bp, Oryza sativa
atgggcttagatgacggtgggagtgatggttggagcgggatcggcggcggcaggttcggcctgcacacgcggatcctatgtgtgtctagactccataggatttgaatctttttggaacagaggtagtagttctgtgagaaatttagtgttaaacatatagttttgtgatacgtcatcttaaatatgtacaactccgtcccaaaaaagataaaccctagcacatatgtccaggctcgtggctaggattgagtttttctatggaggggtagttttgtaataatttaaatatatgtagttttatatagtttacccaaatgtaatttaaccaacggcaccggccgaccgatttttaatccaaggataacttgcttacttaccaattatttccggcccccaagggcccaatccgaacctcctgtgctgaggcgcgcagcacacagaaacaggggcaagctagcttacctagctagtgccctgaaaaggtcacctcatcagggtcaagtgatagtagtgatttctgacaacaagcatagctaggggcctttcttttttttctatttgtgacactggcttaggaagtgaaaaaaaagggacgaaagccccgcaggtattgaagcgagcatttacaaaaatgtttcccccggaccttttaaatcaaaagatttcatagagaaattttataggatacaaatcatatgcaaactttttccatttgaacctttgatacaaaggattggaggatttcaaatcttatgaaatttctgtaagttgactcattgtatgtaaatttcagactaaacttaggctgtgttaattcctagtggttgggaacactaccctccattagcatatgattaattaagtattagcttttttttcaaaaatggatcaatatagtttttttaaataactttagtatagaaacttttacaaaaacacagcatttaacagtttgaaaaacgtgcgcgcagaaaatgagggagagaggttggaaaccttgaccttcgaacgcagctttagtaagagtttcaacctcttgaattttttttctctcttttatctgactcttgtgtttttctctgactcaattaaataattatttatgtctttttttatattttataatattttgttttacatttcatttctgttcatttctgttagaattctctgttttttttaattttttttcattgctacaataaaaaagccctaagaatgaatgagattacacacgatcgaccgagcagggaaacgaaaaagcggatgaagaaaaatgtaaaacaagtaggagtagccagcagctgagtgagagcaaaaatggagaaatgcgcgcgcgcattgcgttgtgtgttgccatttgccaatcccatcgaacgcgatcgatgttcgtggcacgaacgagcgtacgatggcgtcttcttcgtcgggcgtcctggaaatgcggcacagggaaggtggaagggaggggagcgacagcggaatcatgacggggccacggtctttttgaccgatcgccgagaaagcaattatgggtgtttgattctgacactacaaaatttcgccattgatatacaaatcaatctgccagtcctttctgttgcttactctgcgtatgtgcgtgccctgcgctactctgcatgcatgctatacttacccatttctttctttctctctctctctcctactactctttctttctctctctctcttcccacgtccttgcggaggaaagagggggagggacttatcgatgccttttttttttttaacctctgccatgcatgagggacgaccgagttgatcgccatggacgctttattttttcgctccctcgtcagtgtcatcatatgctcaattcatcaaaggagacgagtagtgtaccctgagacactcagagagaggcctttggtgaaggattcgagcataatgatgcatggcaatagccacacggtggtcccttcattttctctctcttgcactcaatcgattgcctttctttcccatgcaaacagagtaaacgaaagggaaatatagctagaaagaagctaacgtgtttatgtatgttgtgtgggttcgctacgtactgttgcatgtatgtatatagttgcatgcatatgcattctcattaaggcctctcacagtgcaaactatggagcccgtaccctcagtccaaaaaattggtcctaagacacccatcccatagtgcaagcacccatatatgtgtgacttaatcggatagaggtactggtaaagggtcccaagcctacagtgggcatgaccctagtttctggaccagtagagcgaacgaaaatttatttcctccacttaccccttcta

SEQ ID NO: 51426 - DNA, 4840 bp, Oryza sativa
  unsure (1)..(4840): unsure at all n locations
agcgatcgggaggagagggggaggagggagagggcggggacgcgcgtagcgcccgggagggagagggagatgggccaatcagagtgagggatgggctggtgggaaggagggggtatagaatagttattctaagggagggatgtataataatgctatatatatatatatatatatatacatatatatacatatatatatatacatatatatatatacatatatatatatacatacatatacatatacatatacacatatacatatacacatatacatatatacacatatacatatacatatacatatacatatatatatatacatatacatatacatatatatatatatatatacatatacatatacatatatatatatatacatatatatatataggggtaagactattctacaccccctaacctttatcatcggtatcctcccatcctcctccaagcctccggattccccctctttngcttcacctccctcccntcatccggatatctctcttcttttttcccattttttctgttttttctccctaaaacattttttctcttttctacttcctccgtttcacaatgtaagtcattctagcattttccacattcatattgatgttaatgaatctagacatatataaggatggcaatagggccccgagaacccagttggggacggggacggcgaaaagtcagccccgaggccggggacggggacggggagcggggctttttgaagtgtccggggacgggggcggggtagcactatccgttggggatggccccgttgccatccctacctgcaagatgtgttcacgatgtggccgaaggtttggatttgagaactactacggttgtaggaggtactgcaaaaggctcatgaaggaaattaattagaagaaaatcatgaacagaaacttcaagaggcacataattaaggactaaccattgtgcctgttgtcccaattgattttagcagtttctatagtgtaattgctcatgattaagagggagctagaggagcatacaggatcaagatgattagggtgtgggttacaagttaaggggaatggagagaagcaaggtttaaggcatgggttgggaaagacgacgagggaggggccggttgagatcaggcaaaccttgatgtccatggtgggtaacctggcagctggagccatctagaaaggccagccgccttgccctcccgaactgtgtttcacaccatcgagcgtcgaagcgtgttccacctttctcctgagccgtgtgatagaccaagctttcgcccgccgttgatcgagcaccaggtcgtgtgtcacatagggctccgcctatcggccgtttcagctgtggccttccccaaccatgctcgccatgaaccaataccataaacaccggtacaattgcaggccatgtacaagaaaaaaaaatccaattgcagttatgggtctcaacttttttcgttttcccctatcccatgtgctatgtaattttccctattattaattagcgtagtaagaacctctcctactggtttctatatataaaaaaagacacttggtgggcttctggtgcacaagaacactactggaaaatggctcttctcttcccggtattaaccccctatattcccgggtattccaccgcaactgggaataaaaattcatttttaatcccggtggttaccgggagaaaaaattcatttttagtcccggtggtaacaccaaccgggactaaaatgaagccaggctaggtccagttgctcctttttttttcattatttttaacattgaatattgatttcactccattcccaaatcatcccaaacaaatcccaaattgatcatcacatcatagatcaaaaggatcctctccaaatcctcaaatcgatcatctccaaatacatcacaaattcttaaaaaaattacatcacaagttctaaaaaattcatcacaaatacataatatattcatcacatcacacacaaatcaaatacattgcagatccgaaataaaaatctcaaaaaaagagaaaaactcagaggtgcttcccgcctgccgcaccggcccgccgctgccgcgccgcgcccgtcctccgtgccgtgccgactgcctccgccgatacgctactgcctctgcaaggaaagagtagataagagcaagaaaagaggagaggataagagagagaggagagggagagaggaggaagatggcagtggcagacacaaccattaggtaggggggtcggccgacccagctacggtccgtgtcgcttcacacttttcaaacctcattttagtcctatttctaacacattaatcatcaatctactattgaataatcaggtaaatcaagtattttaagtaggaacaaaaacatttatgaaaattcgtgtataagtagtaccaatttgactgtttctgattttggccatacataaaatttgattttctttctatttctttagcgtataatacagtttacagtaaataattaaattggtaaatatataaaaaaatcaattttactcacttgaactattttgacgaagcacttaaacccctacataatttttcatctcgttttatacctacgaactattgaaagtggttccccttattgtctaacagtatttctcatttttttatctctctacatacaagtcatatacatttgttcgactatcaatctttgttattaactttctcgatgttcgtgctgtgcgcttttgcgccaatgccgtgaaccagcgactatggtttgtgtgtgttgtgccattacctaattaaggctagctctgtcgccccatctgtattttaaacctgcatccgccactcaagatggggagaaagactttccgatagaggatttgaggataagtcctagggattatatactactgttgatgtaaaaacacgaggcctgggagatctgcttaactccagtgcaggtccaaaacttgcctttaggtatgcgagcgtgccagttgatttgatcctgcaatcaacaagaaacaaagacaaagcaaccggtagttaaatccataaacgatagccgatcggctagatgccgatgacatatcatttatctttgagcccatgtcatatatacatcgatcggcagtcgttaataagtaagaaagaactatatctacttgatcggttgtagatattaacagtatatagtccctatatcgatatatacttaaatcaagtgattgggatagatcggtcaccatgccgagacagtataaatcaattagatcgaaatatatattaataatgagactatatatgttcatagcatagccgatcaggtagatctagcatgtatcggctaatactccgatactactctatattaagatattaaaacaagtagaatatatcaaacaaaggcctaatatacttaaatgcaataagatcttacataaagggcagatttaacatgtcaacaaagcatataaggtaaatatagttaaatcaggtaagatcggctgaaagtccgatactaccctagttggcaaccaaagacaggctagagattgagattctaatcacgactcatatgatcaaactcaactgatgtagctacaagtatgaaaagaaagacaatatctagacaatcaagccgttggatgtgtcataaagtggtggatatcatatataatctaagtcaacatcagtatctatcctaatcggctgccttctactaacagatgttagccgattgtaggttaggtaacgatattgccggagattatgtatgatatgtgataactcgacaattacataaacaagatttgagtatcataaagatggaagcactaatcccgagaacgcaagccgccataataagttttacctcttgttgaagatcaaaaccgatgcagctcaacccaaaagcaagaactcatcgaaacaaaacgaaagtaaaaagggtggcgatgcgccgagattgtattgaccgtgtgttagtttgattacatggggctcggggtctatttatacccgagaattacaaaatatgtccatatcggacacgactcttatctctaacacactctaagataccataagtctttgtggcagacttttgcccaaacatatctctaagagaattacataaaatatcctaattaatagatacaactgccttctcaggactctatccatgcgtggcaatcatcatgaagcatatcaacctaacccgacaacatatgcaatgttatattatcggatccggcttgatcggctaaccctgtccgactcgaattctgccgatcttagtcgtagccgattcggactccagccgatcttcactctgtttccgggacgatctccatctcgaactccatctcgattccttcttcatctccgattcttagattaccaaatttggtcgttaacaactatgggttgaattttagtcccagttggtattaccaaccaggattaaggatctaaataatctttactcccggttggtacaaccaaccggtgtaccaaccgggactgaagtggtgatctttagtcccggttggtactaagatccttggccccctgacaggcctctaacagttggtaataccaaccgggactaaagatcaaattttttttaattgggactaaaaccaatttttggtcccggttcttattagaaccgagactattgtcgaaatcagccgacctagcaaagatcacttttccagcagtggatggagcaatctatgggcctcaacttggggtgtgctggatgtttttccttttttttcatgcttaatctcattgattctacggcggaaaggtgacatgatctctttgatccaatggctca

SEQ ID NO: 51427 - DNA, 1650 bp, Oryza sativa
tcttttttatcattcggttgtaatgaattaggagttgtactcttgctaccatcatcttcttcatcagctctctaagttggggtcaaagacttctgggaacttggcctcctgagggactccaatgcttgaaactttggacaattattcaattcctcaccttgagccaagaatgattaaactgaaatgccttaatctttttttttcctttgatgagtacaacgcctctgcttcaagaacctgcagcaaaactcaagtgttagttcacatacataaaaaaattaaggttgtgttcggtaaatgggtttgggaactaatcttccatgcatggaaaacagaacgatatattagagcactattaattaagtattagctaaaaaaacttaaaaatagattaatatgatttttaaaacaacttttctatagaaatttttgcaaagaatataccgtttaatagtttgggaaacgtgcgcacgataaacgagagaggtgaagttgggacaactgggtaccgaacatagcccagttcgtatagggatgggggagtgaaggcaacatttcatactactgaatagacggacttccgtttttcttttcacgaaagatgggcttaattgactaccctcgcctctcacctctccaaacatgtggccgggtggagagctaggagtacatggcggtgacgatggcctagaggtgggggatgagagggtgggagcggtagggtatgttgtccaagctactgaggagatttgaggagacggtggcggcgtaacggccaaggaagtgggctgggaagaagcacaagtgcgcctccacatctgctgccgccgagactgaggtgggagagaaatcaaagaatggggagagagataaggaagaatacattgtttcactgatatatgtgggtcccacaagggtcttttttttatttttgattttattgccacgccagcgccacatcatccaaaactgcctttaataccgccttaggaccaaatgtaatccggttttgtaagataggaatgcattatactcaggtgatgattttgaaactcgatgacaagatgagaggcctcaagagaacattttccttctctaaaactagaccaaaatttccaccgggcttttgagctaggaaaaagtacgaattaccccgctgaactgttatggtcgactaaattacctcctgaacccaaaagccagatattgctcaccctaaacttttaataccagacgaattacccccctcgacactgttctaagcggttttggtttgagcttgcagacgtggcgctaacgtggcaatccagtcagcaaaaagactccttgggcccacttgtcaaatctctccctccccctctctctctctccctggtccctttctctctcctaagcgccctctctctctgttcggtccctctctctctcagagagccagctgcggacgagctcgggcacactggtgtggacgggcagtgggcggtgtcgcgtggggatgcgcggtggacggcgacgcgggggaggacgcggcagcggcgggcagtgccatctcgagctccgcgtcaacggtgacgaggcctatgcagggggcggcgggcacaacgcaggaaggacgcggtggcggcgggcggtgccctctcgagctccatg

SEQ ID NO: 51428 - DNA, 1391 bp, Oryza sativa
ctattaagaggagttctaggtgatgctctgagatatgtcaagtgctcttagtgtgaaccaagtgtcaagtttccctaggagtcatttttgcaaatactccatctgtccaaaagtgcaagtccggaacttcctgtcttccaggtccggaagttctggtcttgtgaaaaagattttcctaagtgtagtccagaagttactatcttccaggtccggaacttcctgtctagtttccagttcaaaattgtgagtaatggctagatgacgtcacctagctgttatacataaccaactcgttccttggccattccactttcacttttcgaaccaagagctgttgctagtctctcccaagtgtttcttgccttctccactcaatctagagcctaattcttgtgagaaagagagattgagagggagagaagaagatttggagaggtgtgaagactaggatcttgggtgagcacttggaatatctcgtgagctgtcatctcggtgcttattactcttggagatgatctcctagacggttaggtgtcgcccgcgagaatccgttgcatattgtggatgtcccgggtaagattgtaaaggatctcccctcctccgaaaaggaactaggtaagttaatgaagttcttgtgctgagattctagaggttttccaagtagagcaacctacacttgtgacgaatttctagaagtaggttgagtgggatcttggtggtcaatcaattctagaaatttgcctaggggtgtttgtcgttgaaggctgtggatttcctctggggtttttgcacaagtgaggcaaggggttaattgagacccagctctttggagctcctcaagggagagtaggatcgcaagatccgaacttcgggaaaaaaatcgctcttgtctctttctgtgatgtttctgtggatgtttctgtgatctattctctgctcagaatacctgtgcaccatcttgtgaagattggcttagtctcctgtttcgaaatttgaattccatcctttgttttgttacccggaagttcctgtcctagaacaccggatgttccgagcctggcaaaccggatgttccggtgttctttaccaggaagttccgggtttgtttgaattttaccgctgcgatttgcttttaagttttcagtgacaacctatccatcccccctctaggcttcaccagcacgttcagtagacgccggcccgcgccgcgtacgccgctgaccacaccgagccgtttctggcggcttcagcctccatctccgcggcgtagtcgacgctgtcggtgtcgtcgtcgcccatttcgctctcgggcatcccctggttggtccccaccacccctcctcctcctcctcccccttctttttccttaccccccgtttcccaaaccaaaa

SEQ ID NO: 51429 - DNA, 890 bp, Oryza sativa
ttcacattagcctagaattatttaatgagagaatttaagtcctttgttttgggtcactctacccatataattatatatatagccaatttattttacacccctcccctagaaaaactaatttacacccccccttccaaagggcaatcccaacttccccaacctccatagggccaaatcccccctcccacctcagtcaaaggctagtcaaagcaccctcccaccggtcaaacccgagtcaaacccacccgttgactccctcccccgcccaccactttgttgttcacgtctcgcaggaatctgtagtaacataacggtcatcgtgcagtaacaggatagctttctcacagtaacaacatcgaaaaatagtcatgatggatctagttttgttaagcacttttttacgaacatcatagtgcaaacggattagaaaaatactatataacgtgagagatattgctctctaaagattgagatttacttttttttagttctcatcttgctgaaacggcgtagtaataggacgttcaatgtgcagtaacaggactactttcctttctgtagtaacaacgttataaaatagtcatgatggatcaagtttcgttaaggatttttgtctcaatgatcgtagtgtagtaacatgactattgtcttgttgtaacgttgttttaaagcattatggtgaaaacggttctaaaaaataatatgcgatgtgagagatattgttgtttaaagattagaattctaaaagtttacttgtattgagcttgctagatgtacttttaacacttgtgttaacttgtgaccagcacatgcacttttttaacacttgtacacaagattgagatttaaaaatttagcaatgtacaagcagtgatactgtagtagtaccg

SEQ ID NO: 51430 - DNA, 565 bp, Oryza sativa
atttggggacatgtagtaacaacactatgatgattattactgcacactcccaaccgttttactggattatcgcaaatcttttactacacgggtattgaacatcaccaagaaaattattgattactatagtaacctgggacacaccatcattaattggcatgagtaggaataaccaccatgctattgattattggtcataccactgaccattcctaaactatagtttttactctcgcacgttatcgcaaaattggactgtgttactgcgaacatgtgataatatgtgaaataaatatagtaacaatgtactaatgtgtagtaacagagtaaataatatcccggtctctctctccctctactctctctcctctcccgatctctctctatctcgctctgcacttccacagtagaagaaaaatagatacgtgattacaaaactcacaagttactttgtttcagtagtaacattatcatatatgtacagtaacactattcaagaattgcagtaggacgctttgttactgtaaaacttataaaattaaccacactttcgtagtaacgccat

SEQ ID NO: 51431 - DNA, 1567 bp, Oryza sativa
cggtctcatcgcgcgcggcgaccccatctcgcttagcatgcatgcacgcccaaacaaacgcctacttttgcacgctttcccgctgctcccgtttcgattggcgacgcccccctgccctgaccccggaccccggtcggacccttgcatgcatgcacgatgcctatgcattcattcacgtacggtacgggcgcacacgctgttgacctgacatatgatcaagcaatatatatgtcgatcgaataatttagcatttgcatgctagtagtacccatgccacccgtagcgagccgtatgtttgcagggataatatcgtatcatatcggagttggccttttgccaggcccaaacagtaccggggaagggaaaagagcttttttttttgacaaattagtccttttaaaaaacttattttcaaactaaccctcgcaaaaagctttaactagaaataggcatgggctcagcgccgatgtcattagcgctgaggtccaaagggtcagcgccacatacgttggcgctgaacccgtggccacgtggaaccaaaaccgatctgcataccgacgtggcacgagttaaaaagctcacaagtctaaactagcattaatgatattgtagtgtggtggtgtggcctctttggttgcaagctagaggtagcaagttcaactccttcaattagcagaagttatcaatttttttgcaacttttttaccgtccttttctttaggacccctttttttccccaagtttactgtcatcaatttttttgcaacttttttaccgttattttcttctggaccttttgtttcccaagtttactgtccagctagcaaatcttcttgagcacttcccccagcggtacaaaccactttaaaaaagcaaatcgaattcttaaatttgatcccggtgttttttccccaagtggttacaaaaatattttgaaataatactgtaaaaaaagagaaaatattgtgagaaaaaagaacggaagtatactatatattccgaatgtaccgttggagtatatatgtcggaaatagtaacgtgggaaaaaataatggaaagtattacatttatttttgaagtatgcttattgatgagaaaacatgcaaaggctcccatcggatggcttaatcgccaaagcgaaacccaaaatttaaattttcaaacattttcatcatagtttcttttacaacgttggcttttaagtcaccaataacacatttataaatagtttcatctacatattcatttttatttcctaataagccgttttggcttattaggaaataagccaaacgatggggaccataatataagaatacttcaaaaataaatataatacttcaattatttttttcccacattactatttccgacatatatactcctacggtacattcgaaatatgtagtatacttccgttcttttttctcacagtattatctccttatttttcttacagtattatttccaaatgtttttttaaccacttggggaaaaaacaccaggatcaatttaagaatttgattagctttttaaactgatttgtaccgctggggaagtaccggaa

SEQ ID NO: 51432 - DNA, 1221 bp, Oryza sativa
  unsure (1)..(1221): unsure at all n locations
ctgcagcccgactaatttgtcaaaaatagttaggtatacgtacgtagtaacttgctatgataatccgtgcatgtattactcgtctattccgccccgtggtggtccttattgttccttgcttttgccaaagtcgtcctctctggcccgtgtcgtcgtcgacagtcgccatggtcactacttatccttccaaaatacttgcccaggaaaaaaatattttgctggtcgaccaaaccacgatagtccccggtttaaaagattatntttagtcccggttagaaaccccacagccattctatgatatttagtttcgattgatgccgggactaaagatcattccctgtcaaatgcatgtcagggggcctaggatctttaagatcaccactttagtgccggttggtaatactaatcgagactaaagatatgactaaagatcatatctttaatctcggaactaaaattcaacgtgtagtatataatccctatcacttatcctctcctccacaatcgcaaatcacacagatcgaatctctccccctcctccttccccttcctgctcccctgttatacagatcttctacagatcagatcgatcctctcttgctcatcccctcccctctcctccacctcctcctctctcctccccctcctccccttcccatccggcagccggcggggccacgcccggcggcgggccggcggcagcggcgttgttttctgtctttttttttttgataatttgtgattcacagagatgtataattttctgattcattgtatcatatggatatgagatgtataatatgtgatgtatttgatttgtgtgtaattttttaggatttgtgatgtatttgatttgtgtgtataagtaacttttaagatttttgatgtggatttgggatgttactttgatttggggatttggggatttggggtttgatttggggatatgcatgccatttgattcgggagaaaaaaaaaggaaaatgggaccatttgggactgccgctattctctacttacttccggttagtaacatcaaccgggactaaagatccctctctttagtcccggttgctgttaccaatcgggactggatctttagtcatgcccatctttagttccgaatttatactcccggttgaaatcctgggactaaaggggttatcagccgggagtaaaaatggtttttccaccagtgttgtcttccccccattcaaaatt

SEQ ID NO: 51433 - DNA, 735 bp, Oryza sativa
tatatatatatatatatacctaaaggggtagaattattttccaccccgggtttaaaataaccctcttcccgttggcacggttccacgcggtcccggggtcccgttcgcgcccatcccgcccgtcctcctgtgaaacagcgacaaaaagaaaaaaagatcgagaaaaaaaagatctcccatccctcccactccattgctgaaaagaggtgagccacacggctggcgccgacctcggctacggcgcgcctgcccgcggcgctctccctcccttcctctatccccctcccctctcggtccctccccctcctcaagatccatctatttctctcctctccctccatgcctgttttccctcccccttctcgttctttcctctctttttttctccgttgttttttttctctcttttctcctctccattgttttttctttttttctttcccaattgttttctctgcaccaatttttttttatcacgtacttttttttctccattttctttcctatctatttcaggtgctccaaaaattgaatactaaatttacaaaatccaaagttaaactcaagacgttatggtttaaagcaagttttctattcaattcatctctataacattttgtgagaaagggataagatgatcgattcttattaaacttaaatcacattatcggtcccctctaacgtttagtatgttgatcaaaccaaaatacatgggacatggtagattaaattcta

SEQ ID NO: 51434 - DNA, 2178 bp, Oryza sativa
  unsure (1)..(2178): unsure at all n locations
cccttggtaatcggtggtttcacccatataatcccataccaattggattaggctattacctatcaaggggcctgaaccagtataatccctgttttctgttggctccatgtggtactaggtagatcttggtaccaacataccccaataccatctatatccggtctacgggtatcccccgtcgacacatataatggtatttgagcaatggcaaacccctgaaatatgtgttttgcatgtcattcaccgataaaaaaagatgccaaattagtgttaaaaaagacatatattgatgatcggccgtatatatgttacttgcaagtatattagttcatctgtcaactacctaaaaaatgcaatcaaacttttgggatatgtacacacaaaagaatcaaatagcatgaatagtaacagcacatgggcaccctttgtggagagtgactcgctaggcgagcagcatgcccatagatgaattcaggaatatagttcgactcaaaatgtgatgggaaatatggaaaaaggaatttcttaaattgatagctgctgacctgatgttccaagaggaattggataaaaatcaaagcagtttggtaaacatataatttagttcagcaattatatataactaaacattattatacagctaaaccattcaattgctatgtcaataatcagtaggaattttgatgattagtaccattataaccccaaatcaacggatctacccttcaattttcctcactgaacaacctcgaaatatgcaactcgctagctcaaaacagttttatgccaacccaactaacttggtgactccagtcccaaccagctcaaaatagcacggtagcacttgcatgagaataaacagggaatctagaaggatccaatacctgagtgagatgatccccggccaacccaatgggcgcttcaccttgtgaagaagtgcacaaatcacaagttcccaagaattttgaagaaggtttggcggaccgatggccaaacttggacgacgcgggcacaaaacaccacggcgccatcggggaaagtcccggccaaggctctagcggaaagnggatgcgtgcggcgaggagtcacggcagcggtgcgctagtctagcggtgcatcgttgcagatctgtcgcgaggaggagggagcatgctgcagagcgaggagacgaggaagatcggggggcggagtcatcgggcggggaattaatcaacggagttggtggaatcccttattaatagcatacaacgaggaagataacggacggattagattagattagatagtggatacacagattagaagacaggggatgatttcacgtgtaagattgctagggacaacttctttttatattagtatatagactagaaaaattgcccgtgcattgcaatgggtgaaggctattttaaatttaataataatggacgggttaggtaaggttcaaatcaatggtaagaattggttggaataaatatttttttagaaaatcatgagctgcaattaggagtctgatcatctcaagttagcatgtaagttttttttaaagcgacttcttatacaactgcttctgcattttcaaaagggaacgaacttaaaacccgactcaaatacagatttgtatttccaaaagcgaacgaatttaaaaaccaactcatacatagatgatgtaccaaagtacggacaaaaacatctttaatttttataatagtttcactgtgagaattcgcttgtatatatgttttttagaaaatcatgagctgcaattatgagtcagatcatctcaagttagcatacaagttttttaaaacatattttttatatgactccttctgtatttccaaacgcgaacggatttaaaacctcactcaaatacaaatctgtatttctaaaagcgaacgaacttaaaaaccgactcatacacggatgatgtaccaatgtaccggtaaaaacatcttcaatttttataatagtagagatatgctcaattggttcagtttagtaagtctgaatttcacatgaattttatctgaattctatttgagtataatagtagagcttatgatgttttccatgcatgagtaaatgagtaatatgaaagttctgctgaatttgtttctgtaaacctaaagaaagaaacaatatcgacaatcttgtacacggaggatcaacgggaaa

SEQ ID NO: 51435 - DNA, 990 bp, Oryza sativa
ctatgcttttcattgtttcccccagattctcactggttggtatatatgattatgaacagaaaccaggaagcctgaactaattatggaattggtattctgtatgagaatcgatgaatttgtgttatttgtactacagcataacaccgagttttaacggtgcttgtcagtgcctattagaaattgtaggctactagatataccatttgtgcactactgttgcgtttgtacttttcaaatagttacaatatagctttaattatttttagaaagctaaaaatcaacagtgatgttatatttttgggaaaacagcttatagggatcaatattttattaaccaccagttttcgaatataaaccatgctagttttgtaaacttttttacgacaagcctgcttttatttttgcatatttgagtatttattcgcaactattctgtctatcatatttggggtgctcacttcttattgccattgattgcttttaaatttataggcgaaacggcttattaacaacttgaaaaatattttatgaataaaaaacttctatgcaagtgtccatagaaatttaaatgttaaaataaacttcaacaaaaaaaaaacctagaataaactaagttttaaaattcaaattttcacttatagctaatgactaaatgaatgtgtaaatatctgatgaaaatagcatataatgacaaaatagaggagtcataattatatacgtttcaatgctgtttagttattccctattgttacttgtaaaaggaatataacctagcactccatcatatacactatgttgtatgaaaccttagaaaccctactttttttaatggtattattaattctcagtcactgaaatttctatacatatagtcacttgatattgaacagtatttggtgaaaagttatagtggaaatgagtatgcaaatttggatagatctctgttatcaaatggatgtcattttataatgggtgcagatacaccttgaa

SEQ ID NO: 51436 - DNA, 958 bp, Oryza sativa
taaagaagggataaaggcagacctaaattgaaaaggaaaagataatttcttatttgccatacgaagttagttggattcccccaaaaggtcactaattgaaaattttgctaaacatggtccctatacagcacccggagggttatgggaaaaaaacgagttccagtagagcccaagcatctttagcaatagtacccattttaaagtccccattagtgaattggaggtttcccccatttcttcacaaccagaaaatgtcttcaactttagcaacaacccttatttctttttcttacatttcaacttatactctatatttatgtctagtttaacaccccaataatataaatataaatatttcgaacacaacttaaaattaaattcaaaatttccaacattgcaaaattcataacaaaattcaatttccaaaaacacatgcatataagttcacaagcattatataataaaaaaaagcatatcgtacaagcatgaatggttcaacaatgggaataacaaatttaaaaacaatatatttactagcaaatgacatatagatcattgtggaacttaacaaatagaaaccccaaagaccaattatggaagcgacatatcctattaccaaacgacacatggatcatccaataagatcaaacatattccatcgaggagctcaaacttcttcattaccactaccaaattcacctccaaagacactactaccactaccaaattggccattgagggcagccacctttgaagcaacaatttgtgtcctcatggccaacacatatgttctcacatctgttccaaggtggagacatcacagaacatgattttctgttcttgctcccacactatcttatgcttagcgaatgagagcttgcgctcttgaatctccttaggttgtgttcggttttaggggatgggaactaatccctcccgcacggaaatggagcgatcc

SEQ ID NO: 51437 - DNA, 682 bp, Oryza sativa
ccaggaaaacacacccaacagtcttaatcttaaatattaaccagacgcagcaggcgaacaacatgatatagcctggcatcaaatagagccagatctaacacctcgtgtgcttctttgtgttggcgttgcagaatcattaagatctggcagtttgcctcgaaaaggtacgactaccactccatgaccctctctttgcaacgtgctgatctctcgttcatagctatcccaacaaggagacccagaagcaagctagagagcacaaataaaatatttgttccagtctcaggctctcagctctctcacgcatgggctagttattgggcatggccctgattggcatcaccatttgacttggcggtgactattttagtagcagtgtagtagtgtgtgaatgaatacagtgaagcagcgagatgtagtagcagagaacagcagctagcaacggtataaattaagagatacaatgcgtaatgtacgtgtgctaatgatgctacgacttggcctgtagaacataatggtggcaattggccagtgtttcagttattctcggagtcagtgtccatgggagtgtgggaagaagaaatggcaggaattggagcatgcgatgatgatggtggtggctggctggtggccgtggtgatggtgtcagtcagggcacaggcacttctcgtaccgatcaaac

SEQ ID NO: 51438 - DNA, 1681 bp, Oryza sativa
tgctatgagtgtcttatttgttgtttgtgatgtgatgttgattttattccttttaagtgctcattatgtcatatcatttgcatatcatatctattcttctgcttatttgcatcccacgaatgagtagggatgaaggaaactctcctcggttgctcccttatatatatgcatatgagtttcacttgtatcttccacatgcatatactaaaggggggtttcattcacctctaaccattcaaaacaaaatttatatcaatctcttgtaagctttaaccatattgtcatcaatcaccaaaaagggggagattgaaagttcattaattcccctagtgggttttggtgattaatgacaaatgtggttaagggactaatgagttcattgagtaactttcaggtgcattagtccaaggtgtggaagatggaagcttggagacccccccaaaagtataaaaccaaagcggaccggaactcgagaagtgcataggatagtttatgtattgcaatcgagtttttaggaaaaaccgtacaattaagaggggttccaggtgatgctctgagatatgtcaagtgctattagtgtgaaccaagtatcaagtttccctaggagtcatttttgcaaatactccatctgtccaaaagtgcaagtccagaacttcctgtcttccaggtccggaagttccggtcttgagaaaaagattttcctaagtgtagtccggaagttcctgtctttcaggtccagaacttactatctagtttccagttcaaaattgtgagtaacggctagatgacatcacctagccgttatacatatacagctcgtttccagctcgttctttagccattccactttcacatttcaaacctagagctgttgctagcctctcccaagtgttttttgccttctccactcaatctagagcctaatttttgtgagagagagattgagagggagagaagaagatttggagaggtgtgaagactaggatcttgggtgagcacttggaatatctcgtgggttgtcatctcggtgcttattactcttggagatgatctcctagacggttaggtgtggaccgcgagtatccgttgtatattgtggatgtcccaggtaagtttgtgaaggatcccctctcctccgaaagggaacgaggtaagttagtgaagttcttatgctgagattctagaggctttccaagtagagcaacccacacttgtggcggatttctagaagtaggttgagttggatcttggtggtcactcaattttagaaatttgcctaggggtgtttggggttgaaggctgtggatttcctctggggtttttgcacaagtgaggcaaggggttaattgagacccagctctttagagctcctcaacggagagtaggatcgcaagatccgaacttcgggaaaaaatcgctcttgtctctttctgtgatgtttctgtggatgattctgtgatctatctcctacttagaatacctgtgcatcatcttgataagattggcttagtctcctgtttcgaaatttgaatttcatcttcaatctgtaacccggaagttcctgtcctaagaacaccgaaagttccgggcctggcaggccggaagttccggagttccttaccaggaagttccgggtctgtttgaattttaccgctgcgatttgtttttaagtttttaggga

SEQ ID NO: 51439 - DNA, 2254 bp, Oryza sativa
ttcccgcccgtagccgagggagagggagggaggggccgagcgccgccgctgtattgtccgtcgccgccggtcggccgggagaggaaaggagaggagtggagtgggaggagaggagtggagtgggagagagggagagagtgagtagggagggaggcagtgggcggaggggcgcggaggatatcgctcgaggtattttcatgtacgggtcagttaacagccccgcacgcaaaaataagtttattttcatgtgcgggcctgttatgtgattgattttcttgtgcgggcgatggcctggcgtcggtcccccattttcctgtgtggttccacttacgaaccacatggaaacaaaacgggaggcgtctaggaaaatcaatgtagtagtggcatgatcatgttgttcagtaccgtcactagatctactcatattataaatatcatgtttattattatgttattatggattaaaatatgcagaattataaccatatttccaacaattactccccttttgccgcaatgaaaagggtggaacgtacgtacttgttgcgtgatgtttgtatagctagtagtccttgcttatagatcgtgtcctgctggccgaccggagccgttgaaatatgcaaacgaaagggtgtcgaacgactaaaatttgagttaaataatttgtcatgttccgtccggaatttagggacaaagctagctgtatagctgtgttgtttttttttttctttgttgaaacgatcgcgttacggcatcaacgacctcatatttttagctaccgttttcgtaccaatcgggagaggcaacgtacgtacatatgcatgcgtactcggccaattggtacaaactctatctcggtatagctagtttatgatgacatctatagagatatttacactgtaaagtttgtggcctatatattattttggacatttgtggatccatcggaaatacaagctagcgccgcgctcctcaccaaaaaagaagtaactctaccacatttgatagtgttttaattgaaaagcttacaaatttaacttaataataatactgtaacgcaatataacttctaaaagagaattcgtatgtaaccaaacaaattgagtgtgcggcctgatacctagtgccgtgagcatttgccaacaggttatatggttcgactttgagtccctatgcacgatcgagatacgtatagaggttttccgactagtccacaaatcttgagaccatccaattatcaaaattgagaaagttttttgaagaaaaaattgccgaatgctatcttgcaattccacaaaagaaaaagaatttgatacatgttatatctagctagacaaatactttgagcggactgtaccatgtctcctctctaatctcctactagtagctattagtagcagctagctagacagaaatatcctactaagctactccctccgtcccacaatataggatttggagtttttcttacaatatttgaccactcgtctcattcaaattttttttgcaaatataaaaaacaaaaagttatgcttaaagtactgtagatgataaagtaagtcacaaataaaataaataataattttaaaagaatttgaataagacgagtggtgaaacgttacaagcaaaaactcaaaatcccttatattatgggacggagggagtagtagtactgatttatgcacactacccaagtacaggacaatccaatggcacatcaagcatacttcgtgacttcgtgtttagttcacccccaactaccttaaacttttaacttttcatcacatcacatcacatctaaaatttttctacacacataaactttaaattttttttcaaacttccaactttttctaaacttctaacatttttcaaggaaaacacaccccatatactactactcgaaacgatgacgcgcgagctggccggactgacccacccatatattcataagcgcacccgtatgtggacttactgttgagtctaacacaaattaaagctagctagctgctagctacgtacccccatctcgcatcacgtcatgcagggccggaattctcaccagcggacaacacatacctcacggacacgaccacatgctacttattcccaatacaatgtacatacagtatatatatacacgtttaatttatactcccttcgtcttaaaatataccaatttttttgttggatgtgatatatcttaccctgtttagattcgtagtactacgtagtactaggatatgtcccatct

SEQ ID NO: 51440 - DNA, 1310 bp, Oryza sativa
aaatgaataaattttaaagttcaatttggacaggggctggattcactgggatttggtttttcttttttacagaccgagtacttatatagctacctccttcgtcccaaattacctggctttcaagaatggttaacatattctaaggtttaaaaccaaaaactataatacccttataaaataatttacggttaaggatagaaggttggttgagggtgttgacgatcaaatttggtaagatgtgaactaggttcgacattgggatcgaggcggattcaataaagagatcgattcgaagaacagggtatgcatcggatgcgaaggcatcggctgaagtctgcatcggcttagatggatcggtcagagaatagccgatacggctgatagaggtgatgcagctgattccaatgaagacggttttaaggctctttgaatcgttcaaagtgcttcacaggaattgccacgatagagataaagctcttggtttaggcaattgtatctattaattaggatatttcatgtaatttccttagagatatgtttgggcaaaagtctgccgcaaagacttatgatatcttagagtttgttagagataagtgtcgtgtccgacaggacatatcttgtatctcgggtataaatatgatccgaacctatgtaatcaattaacacacgttcaatacaatctcggcgcatcgccacccttttactttcgtttacttttgatgagttcttactttcgggttgagctgcatcggttttgatcttcaactaaaggtaaagcttgttatggcggcttgcgttctcgggattagtgcttccatctttatgacactctaatcttgtttatgtaattcgttgagttatcatatatcctatataatctctggcaatattgttatttaacttttaatcggctaatatctataattggaaggcagccgattaggttaaataccaacattgacctagattatataggatatccaccaccctatgaaacattcaacggcttgattgtctagatgttgtccttcttttcatacttatagctgcatcagttgggtttgaccttataagtcgtgattagaatctcaatctctagcctgctttttgttgctgattagggtttcatcggactttcagcgatcttacctgatttaattactttatatcttatacgcttgattgatatgttaaatctgtcctttatgttaagatcttgttgcatttaggtatattaagctccatgtttgatatattttgcctgctttaatatcttaatatagtggtatcggagtatcagccgatacatg

SEQ ID NO: 51441 - DNA, 779 bp, Oryza sativa
ttctctcactttatcccaaattttgcgcagaacaaatttagtgctctgctagactgctacaaggtacagaccacttcaacattggtaacacttgattaattacaacagctggagtattacaatggtacaaaacaccagatgagaaaacaacattaatttaacataagacaatttattgtacaattcatcttcatcatgtattccctttcctccaactaaatcatgcattcttcacttcgtgaattactgcattgatatcctacatcactcatgtcctcgatggtcaatgaaatcaccatgggaagttgtttccatttcatttctttataatggattttcctatgaaaacatggtcacagacttaactctgctgaaaaagaattttctccctgccctcacattattgccttttgctcttgcaatctgtaatgtttttagtctcgaacaatggtcacaaatggatcatcttttatttcacaaaattcatagaagtaactataggttgttatccccgaaaaaaaaaactatagcttgttatgacaagccgtccttagagcttgataatgtcatggcactttaattagcaagatcatcaagtggagctcgttcctgtagagacattggtagttaagacttgaaaatagcctataaagagtatagatggacacataaatgtataattatatatactgtaaatgataatattatggttcagcattttcataaaaaaagatagtatggttctacaacttgaaacaatgcatattgtcagggttacg

SEQ ID NO: 51442 - DNA, 4334 bp, Oryza sativa
taaggattgactgagtgttagattagaataaatcacaagccaggttcgtataattggggattaaataagtggatggattgaggagaaaacacgagctagacttatataattaggacttgaattggctggtaggtggattgagaaagtattgaacaacctcaatagatggatggtgagaaggtgacagatggagtagagaaaatcataggggtagcattttcaatgttatgattcaaatatggagcaattgacaagttggtggtaacttggcagaagaaacaataaatatcaagtaagtcattcctacgtcccttaatataagaagttttagagttggacacggttattaagaaaataggtagaagtgaatggtgaagggttgttattggttgggaagagaatgttggtggataagttattatattttgagacaaattctaagggctaaaagttgtcatattttgggacggaggaagtaatagctagctctttcaatttgaaacaagtgaaataaagttttagttcaaaacggcttcttcacaaggtcaatgctaataaataacgagtattcccaccgttccgtaaaattataatataaggctatcaatctgaacgtaaccttagcctctaaaagttttctatttttttaggctatctatatatttatcgataaattttattatagaaaattttcagttgcaaataaagtacgatatgagtgtaatcactgcacaatcatatatgatataacaaattaaagataaacaaaatcactggctcacgaatagctcatgtagagggaaaagaacccaaaaatgcgtgagctataaaatatatgtactagcaaaatcgggaacggtcagcagtggtagaaatagaagggcaccaccacatcaaataattaaccaatcaaccaactcacatgcttgcaccaagcagaatactttagttacaataaccaacacatgcatacaccataaacagtatttagctacattatagtcagaatcaaaagccatcacgaagggttgtgtcaggtgcaggctgtagacccccgattttggaaatcgaaaatcttctatgtttatccgtaccaatctctggatcagtagttggtacacacatacatagttggatcacaacatatcacgaatgaatttaggctaaaagagttaaatacttacattagggccaggtaggccaacaactatcagagaacaacagcagaagacaaaataatataagggcctggttaacatgccacaggcagtcgactggggaacgagacctagaacaagaccgcactccgatcatcttgtgggatacgcaagcgtaccgacaatggcttctctttaacactctcctaaaaaatatataaatagcaagggtgagtaccaaccgtactcagcaagccaccacaacaacaatgcatatgatagagggtattcaaggaatgctttcaggttcttttgcataaagctgcgttttgcaaatattttcacaagcctaagacctatcatagactgatcatattttaattccagtgttcacattaaacaacgacggttctgtccaccatccattgtgatcccaaggatagcttcccgccattgagtcgtcatggttttctgaggacgtccaccttccctcctctcaggaagtggctccatcagcataaaaatcaccatgcaatatcccatcccacacaagttaagaatttagagtctagccaagtgtaatacatgtcccagtgctcattaaccgcgagcacggctattcgaatagatttggtttgctcacactgcagtggatgtacactttacccacactccgcgactgcccaacacatgagcctcgtcccaacacatgagacgcgtcacggcaaagcttttcgataacctcgcattggcagtacccgctccatgaacttaaatcctcatgcattctaggcgtccatgtttctagcagtgagaggagttctggcgctcccgggaaagagaagtctcacacgcatattaaattatggttcaagttaagttctctctctcacacactcatggcagtcctaccaatggcgacaccgatgtagggcacgcttctcggccctacctcaacggctgtcccatcgtagcgcacctgcctcactcaggggtgaaccatctatgcagggatactgcctccgctcggctatctaatccgctaggtctatatcccttcgagaagtacggttgtacgggggtcgtttcatgcttaacttcatggctcggtccttaattgactggggacggtactagccttttccagataccacccaaatcctccatccgccccagtcgaaaacagttgtttaattttatttctcctttcacaaatcatgtcatcaacatcatggcaatgtggcgctcatgtctccacatgccgcatctcaattaccttcccaaaggtaattgcccaagcatatagcatttgataaatatgagtatgcatgattctagaatagcatttctaagcaattgtcatagttgactagggactcatacgtaaacatggttacaaagatttaagggtaaacaataatcaaggcatggcataatcacaagtacgatgttcatcattgcatgcaattttatttgtaaacaaaacaatttcgcaattgggatcaacatgttcaaggaatagtgatgacttgccttgctcaggatagtccttattcttgatataattcttgatcaaccttcacctcctgaaagttgctgacgttgcctcacaactttccgatccacaaagtctataatacgctagaaaaaccaatattcaagcaacattcaaatatgcacaaacaaaatatattggttgaggttgaacctaaggttgctcatattattcgcgcttgctaatgggttccaacatgctaagggctaaagtttcttaatctttctgttatcatggtggtctatttaggagctagccaatgtagtatgaatgagatacgtatctggctaatttggggtttagtctagctaatggctatggaaggattatggctacacatgcatctatctaaataaaatggtcgtatactagaggttctgttgtcggatggatttaggatcaatcaaataattacagtgaatcatttgtattatttattttattgatggaagctttactttaattatgaacatattttacttgtcacaataaattataaaaggttaataattatccatgcttcgtatgttagagttgtttaggttaatcatattatggttacagattatcccatcacataattttacaatgaataatcctaatttacagttaaactataattataattatatgaggtcaagatttataactagtatttatctaatatacatgtttgtcatacactctctcttaatttcatatatgcaacacgcaaattaatactataccgtaccactataatgggatgtatagtttatgtgtaagcaacaatatcttattattggatcatatatttgagtagtttctttttactgtaagctatacaatacatgttgattttaagatggctctatttggttaactaatggatatcaaccgactatatatatatatattctacttcacatgacattgaatcaactaatttttttaagtggtccaaatacaactagctctgtgattactctcctaaacaagttaaagattcatctatgtgtgtttatagtttagttagaaaatatgaggctaaactttatgtaaataatttataagtcatagaattaattatatttggacataggctagtaaatggcactaatattttcctttacacccattaatttgaaggattgattataactaatttatttggttgctacagtgacaagacatattaaagataattatgctactgtacaatatccattttttttatttattggcacactatttaggttaactattatctaatcatttgatattaattaatttataattataaatatattttattgaatagtgaattatatatcattggaaagcttatgaatttagatgaatttaggttcaagtttcactcaaatccgagttaaaatgaataagttatgctagtgtaaagattcaaatttgaattaattctaataattgtgaaatggtactgttcctaattcatttatttttaatacaaccttatccacaggctatagtgactgacaggtggggtcttcctattttcttttattttattttatttttctttctaaaggaatcatatgggcaaatgacaggtgggcccgactcctttgactagggtcaaaccggccattaaacccggtagggcc

SEQ ID NO: 51443 - DNA, 2583 bp, Oryza sativa
acgcgcacggcgcggaggggtgcggggcgcgaggtggcgcggcatggggcacgacgcgggggcgacggcggcagcgcgcgcggaggggaggggctcgagacgacgcgacagacgacggcgatgcgatggagtgtggcgcggcgacaggacggcgcgcggcgcggtagtggagtcgacgggacggcgatggcgcgcggcgggatggagacggcgcggcaacggcaacggcgcggcgctcgaggcgagcggtgatgtgacggcgacacgcgacgacgtgacggcgacggcggcggcacgtgcggaggagcggggctcggcgcacggcgatgggacgggcgcgcagcggggcaggggcgcggggcgcacggccagctagggccccgtggtgggagaggaggggggagggctaggggaccacatcgaacacctatgccgtaatgaacagtgacttttcctatttatcccgattttagtccatttcttgtgtaaatttgattctataaatcctagattttgtataaatgaagtttacccaatatttgtgtcattccaaccaatggatttattctagattaatattactcatattttatttatataatttatttgaatttttaattagggttaattcttattattattatatatttgtcaaagttttcctatttttcttcttttagggttttggttgatttataaattcagaaaagttgcaaattaaatttgtatttactcctaagcatttgggtgaccgtattaagtgttcaaatgtgaatttgcccaaaatttaatattgtccaatatttaaggtttattaaagattctataattttctaatgagaccgttattaacacaatagcactttagttcaatttatttatatgttagtttatatggaggggtttaatatattaaatttcaatccctaaatgcaattaggaacttggtgtaatatcgatctacatatagaattaaatactcccataattctattatatatatattatatatacagagagctcagtttatttgaataatcatcatttcatgtgtactcatattatggcacccacctacattattcaaatattttaatatttgataaaataggttaataataacttttcttttatttgattttaatatcttgtgcataattatttgtaggattaaatatattctcgtaaatcatttctattgcttaaatgtagttcttttctttactttcttggtgatcatttatggtttggcaagcaataggaatcataacaaccagcatgatgcaaaagttttaaaaagttcgaaattttagtgatttttattatcaggaattttcagggtgttacacaggccctcctccatctaacattacagctaattaaacttcaagcattagtaccaaactttgcacgcttacgccgcgcatctctccagccagcactgcatgccccaactacaccggatgcaacaaacaccgcaactacgttacatccaaacactagattatctcgaaatacacccctgggcatcccgcagaaagtcaacaacctgtgcgaatgatatacacaacacatatatatgaagctgcccctgaaaccaaggtggaaaacaatgacaaacataaacttgcaagcaaccacataccggctgagcacatttctatcttcattctccaccctttttaccttctcgacatcttcaatcatttccctcttcaccttcgccttcaattcatcaatttctctgacgatgttggtccttctgacctgattaggattcacaggtttgagcacaaatcaagacaaaaatgatcaattactccctcatggtatcagaggacggtaagtcaccagcattgttagtgctgagttgttactgacaagcattcataggcctcaacgtcgccggctgatttagagaagaaaatgaaacacacaagcatacggcggactgaggttacaagttagaaatatgagagaaattcacatactcttttagaacctatatagattcagcggtaacacttaaaaaacaacattttttaattagtaactgatgaaaatgagcctgtaatcacagtatgaaaattaactatgaacattcagcaagtgtgttcttaacatatatcagaaagccgactgctttctaactccagaactgttttatgtgcccatgctcctaatacatggtattactgttacattcatgcggtcattttctaatcttttagagaaaaacagaatctcttctaatataacaaataccagccaacttgcacatacaagacgatttaagttggtcttagggagttagggaagaggagcccagtagcccaccacctctccaatctcatcttaatcttatatatgttttaccttcagtatccaaaccaagaggccagataaaggctatatttatgtgcaacgcataaggaaactctaagacatatagacagaaaccaaaaagaagagttttttttgaatcaatttctaaataggattagagatggagtaacataagtgaaattctctacagttatctactgctgactgttagaggggacaaaattaggtactgggatt

SEQ ID NO: 51444 - DNA, 1873 bp, Oryza sativa
gcatcatcagaggcaagaaatcaagaagcgggctctcgaatcgccgcgcatgggtaagataaaaccctaaccctattttcggaaggcaaaagcccgcgcatgcgcccagccgttgggacctacagcgaggaggaggaggaggaggacatgggcccgtacctggagcaggagcggcgggagcgtccggctcgtccatcaccttctccgcctgcagcgcctccgccgtggaggtggtggtggcttcgcgccgccgtttcgaggaaggctagggcgccgccacccaccggctccgcctccccttctcctccgcggaggctaccaatggagtcagggagagcagggcagcgcgcgatggcggtggcggcggcggcgaggcgacggcggtgggtttcgtcggatttggtaacgggcgcggcaaggtcaaagccgggtttcgttggcctcctcttattgggcctgacctgtttgttgggctttgtgggcctccatttgctattgggcttctgttatttagagttggcctttcctttcatctcccacgagacgtaactgctgctcaaagctgagtgttaatttggtattcttcccgaaaatgggttcaaactaattttattacaaattttgtcagattatgcaatttttattatattgataactggatgagacggcagcatatacatatcacgacatgattgttacttcctccgttttacaatgtaagttattctagcattttccacattcatattgatgttaatgaatctagacatatatatccatctagattcattaacatcactataaatgtggaaaatactataatgacttacattgtgaaacgggagaagtagatacttagaaaataagcgcactcgttggcgtgccattttcatagcccgtgtataatattaatgttgaaatttttccgaaccataccagactcaatgtccctttaatgtcataaaatttgattattaaaaatatagttcgtcaaaattagcaacttaaagtcaaaaatgtattttatgaaggcaaggagtatttttaatggtatattatatttacatgtgttttatgatagtataaaatatcaatttctcgatacctactttttttaagaaaataattttaatccgtttgtttgtgttctcgaataattatcacaaaatcggtttcatttatcatccattagctagacgtgtgttcatagttttcttcttttttccacaacataaataaattcggtctcttcttgggacatataatgcgtgcacttaactattacaagcacatcatatagttattttcatgccctttctcaaaaaaattcatacccccaacattgaaaaaaattgctattatcatatatatataaattttttattcgatgttctttaacaattgtacatataagccaatttttcaatgagtagctcacataagctactccctttgtcttaaaatataagtatttttggactctgacacagtctacgagatactattttgactaacaatatctataaaagtgatgttttaaataaaaagagttacatattatgatagtttgtttaatgataaatctagtaacatcaattttatatgatatgatcttttttatatttttactattaatagtcaaagttgaaaatgtttaacttgttaccatgctaaaaaaagtttatattttggtacggagaaagtagcttaatagctatgataccttggaatatatggtaataccttgaaaccatttattcaagttacaacttgggatttcaggtacacagacttataacggttctaatgatcaggtggattaattcccttgaagctgcggccacggaagtctcttgatgtttcgttttttttc

SEQ ID NO: 51445 - DNA, 636 bp, Oryza sativa
attgtggtgtacttacgttgacgaagcagtcgtggagaagaggcggaggatggccggcgccgtgcgggggttggcggcggcgtggcgctccatgaccgagcgcacgatgctctgcgcgttggggcacgtctcgtcgtagtaactctccgtgaactcctcgtgaccgaagggatttggaaatccctgagcggcggaggcgagagccgcgacagcgacgagcagagcaacccaagcgacgccgcccttacacctaaacgccatggctgatggtctccctccggcctcgagagatcgatcacgatcgacaaagctccgaaacgagagatcgatcgagccctaggcccctagcttaatgattagcttcgccttggtactgacaaactccgaagtgatggtgagctctgctgctgctggctgctgctgattgcagatgttgtggtggatgatgatgagtaggaagcatgcgttatatagatggccagttaacgcgtggcgaacgtgcgcacgacggggtccctggtctctgcaagcgcaagaccagcaaagctcgtgcggcaactcgtgacgaggtcaccaacaagagaaaaaaatgggaaagtatagagaaaagaaaagtaggaaacgaaccaaaacaaa

SEQ ID NO: 51446 - DNA, 581 bp, Oryza sativa
cgacctccaaagccatttaccctctcattatactgttgcatgagctctctctctacgtgcatggccgatggccatgagcttttaacacgtgaaaccgttaatattttgatacacgtttgagtattcatcttaattattaaagaagtttatagaattatttattttttattatgaatttgtttatcattaaatgtacttttaccattatttacattcgtatatttacacgtgatttttttaaaagaacaaacgatcaatcgcgtgtcaaatagttaacgacgtgatctatgaaaatccgaaggtgattttagtccctccggaagtatattggatgctttatacatcgacatatcgtgtatcactgaaattaaccgtaattatgaacacttgttaaatttaggatgtatataaacccgagttgacatgttttaccacaagaaaacctaacctgccgagctccacacaattcgcggagggggcataatatattaatgtaatgctacacttaattgcaattttaaccactgtcatgcttaattaatcacccgtagaagaagaacacgactaggggctgcaggaat

SEQ ID NO: 51447 - DNA, 549 bp, Oryza sativa
ctgcaaacgggtcctcaatcacatcctccccactgtcctcaacctcagaaccatcgggggaacacggcaaatgggcgttgcgaaggaggttcttgatccgtcgagtgtccttcttccttgctctgcgttccttggcttgccaagctaagatggtcttgcataagttgaagatggacttgaagaacctcaaggacgagttggaatccggcttggtgacggtagcggagggaccggcacgagaagaagcacgagtggtttgtccagccggcacagcagcagccttgatgggacggacatggtaaccggtatgtgccacctccttgtgaaacttcttcttggacataatctcaatcatcttcataatgtaaggcccatagccaagtcctcgcttagggcttaggcatcatggagataagccggatttcttcaaagatgaagtcaaaggcgtcaaagagctgtgggtgagccttcatcttgtaaagcaaatttcttgtataggcaaggacgttgctagcatcaccttccttgggattgagagttttgcgcaag

SEQ ID NO: 51448 - DNA, 1161 bp, Oryza sativa
agagtaaacttgattcttgaactgatccttgatcatgaggatacactgatttagaacagaggataatgattaagaagaagtggaagaagaatatttaaatgtgaagcaaggagaaatttggactgggccaaaaggaggtcggatagtctgatttgacgtcggactatctgatgtacattggactatccggcggcatattagacaatccgacggccttttgccctagaccaacaaatctcgattcacacaaaaatatccaatggaatcaaaggatcttctaggtactagatctaggcactaaaacaagaagattcaccgaaggaaatcttgaaataatataccatgagggagatagaggaaaaacaaggaaatacctcaagaaccaccaagagaatcactggggaacaagtgatttggaaggagttgagggagggaaaccaccctaaagagaaggaatagcaatcagagactctgaaacgaagatttttggtggcctagaactagggttttgagaggagaagaggggtggagagagaaacgactgagacaaatgactgaaggggtaaaaaaaaagagttacccccggggaggttaagtccccttgcccttggccccacgtcggatagtccgatttgaaatcggactgtccgattgtggccggatagtctgacttgatgtcagacagtccgacatcctttgtggcagagacaataaaggatggctcaaggaagattttttttttcaacaacatttttataggatgaactcggctagactattacttggacaaatgcagcaaaagaaagaaaactaggcaccctcaagagagggaatgtacgaatctataggaaattgtgcaaggaccaagattcattagagaatgagatccccgtacacatagattcaagttatcctcatagattatgactagtgtttattcatgaattgaatgttcactttgtcatgatgtggcaagcaaacctattctagtaaatgaaaaacaaatgcatgcaaaagatcaagccacattccgaaatccaagatattagctcacttctcaactcacaaaacctagcttcatcaagaggcttggtgaagatatccaccaattgtttgtcgggttttacaaggtggaagtttaagttgccttctgtggaaagg

SEQ ID NO: 51449 - DNA, 840 bp, Oryza sativa
agctctcctatttcatttctagcatatctttagggggagctccaccaaaatcctaatcttttattacttctaagtgtgttgtcatcaatcaccaaaaagggggagattgaaagtgcatctaggaccccacatttattttggtgttaatgacaacataattagagggtaactaatgctttttgttgagatgtatgcaaggatgaaaaaggagtggatgtcaacacaataagtattgcagcatcttttgtggtaattgtcttctaatccatgtatatcttgtgttcttgagtattaggatgccttactattaagaggaatgccacatgcatataattggtagaacactagtactcaaaatcatttatttgaagtgttcctgttttatgtctgtcggactatccgatgttgatcagactatccgaaatttcacagaactttgctcactgtcttgggtctgagtgttggctaaaatatatcggactatccgatataaggtcggactatccgatacgtcagactatctgaaatttctcagaacttcactctctgttttgaattgctttttattccttttgaaatttttggttcaaaaataacggaatatccgatatgacatcggactatccgatcgatcggattgtccgaaattctccagaatttcgttctctgtctctggcctgcttgggggtcaaaaacatcggactatccgatgtcacctcggactttccgaggtgggatgaaaagattctctcccaacggccacattttgggggcttctatgaataccccccacctaacccttttctagggttacccaactcattcattcacattcacttt

SEQ ID NO: 51450 - DNA, 739 bp, Oryza sativa
ctgcagcccttttgtttggtatattatacttgttttaatatctttatatagagtagtttcggagtattagccgatacatgctagatctatctgatcggctatgctataaacatatataatcctgttattaatatatatttcgatctaagtgatttatactgtctcggcatggtgaccgatctatcctaatcacttgatttaagtatatattaatataagaactatatatcgttaatatctacagccgatcgaatagatttagttccttactatctatttataaccgccgatcgattcataaatgacatcggctcaaagataaatgatatgtcatcggcacctagccgatcggctatcatttatagatttaaccaagaattctttgtctctatttcttgttgattacatgatcaaatcaactggcacgctcacacattcgaaggcaagctttggacctgcactggagttaagcagatctcccaggcctcgtgttttctgtcaacaaatgtaagtatactatatatattagaagtataggaatatattttctttctgtttttttcccagttagcttagataatatattatgagaatgagtagctaatgcttgtgtgtcactctacccttggattatcttaacccctgcttagaatatgattatcacaagtaatatataaattattagtcaagttctctctacatgatctttccatgggataaaataaatacgatgcccttg

SEQ ID NO: 51451 - DNA, 695 bp, Oryza sativa
ctgcagcccctgtaatggattatgttgtgcaaggggtattgtcacaactcctttccgaggtaccgtggtggtattgaggcacatggtgacatgatgtggggttgtgtcttgtgggtacagtggtacacctctggccagagtaaaactattcgaatagccgtgcccgcggttatgggcgggttgagcaatgtttttcgtgattagtctcacacctctcacaataattatggatgttaatacctgataataatttgcctagctcctggtttggagttagatctgtacagccgggtatggttgttcaggatggttgggcctgtacagcatgggtgtgctgttcagtgttgattaaaatttttaattaattactctactgttttactactcttaactctttgctaaatgctgctttcgcaaatgagcctatattatgccatcctttggtatccttgtgcacttgcatatttgctgtgtggcttgttgagtatgtcatatgctcattcttgcaataatcaatcaacctcagttgaagaaaaaggatccagaaggagaagacgtttggcttataccccagttgagctgcctgtgggagtggagctgaagccatcgctagaccgttaattccgctgctgttttcttttcttttgtaagtgtgtaacgttattattatgatggatttgtatattaaattgtca

SEQ ID NO: 51452 - DNA, 738 bp, Oryza sativa
ccgcataggcagagaggacgctggcaccaaggtggtagtaggtatacacaaggatcgctacgccagtttggatcctcaacacctcggcgtctagccattgacgaaagccggtcggatttgtaatgaagcaagtggagaagagagtactgaatgtgactgagttttgaaagattgtgaggcctcactcgttaaggcgacttatataggcgcaaaaaatcgagtgatacccctgacatgtgaacgtggtggggtatggtgggtacgcctgattggcgccgaaagatacatgcatgatcggcgccgaaagttacattggtcgtatgcgccaaatggcgggcaaatactcgtatcatacgcgaataaaggagactgtatcggtgcggcagaaagtagtcgtgcatgcgccgaaaggtatcgtgcacatataacaacaacgtagtcattacacaagcatacagtactggaaagtgaagcctgcaataacaaattaatatgtcattataaaaaatattacagtgcaactaacttatagtaaaacactgttcgtacctctcgacaaaggagtcgtgaaccgtgagtagctcaccgacgtccgtgcccggaacgtcccaagctgagccccctgcaccgcagtaaggtgagaccggtgtcggtgatctatcgccgggtccaacaactgaggtgtatcctgacgtgccatctctgaaaaatatagtgtttcgtgttagaacaattcaa

SEQ ID NO: 51453 - DNA, 903 bp, Oryza sativa
tttaattaatctcgtcatatgatctaggtgatcgcttcgttcagtagtttgaacatttttattacaaattttagtcatttataaattgtattcctagttgagatcttaattttatttttctaatttcggaatttgatttatttttatgtcgaattttaattgatctcgtattgtgttctatatggattattattttaatattttttattttagttgttcaaaattgtattccttcctgaactctcttttttatttttctaattttgtatttttattttattttttattctgaattttaagtaatctcgtattgggttcttatgtcgacttgtctttcaatattgcctatttttaatttcgaatttcagttaattttaaattgtattcctatttcaactcttattttattttcttcttatttctaattttatttcattttttactttaaattttaattaatcccgtattgggttttcatatggactcttcttttaatatctaatattgcttacttttataatttttattcctacttgaattattatttattattttcttctaatttatgattttattttattttttgattccgtttttttaatatcgcttatttttaatttcgaattttagttatttttaaattgtatttctacttggactattttttttctttgtttaatgtgcgaatattgggagagagaaaaggcatgcattgagttcagttgtgttacgttgcctggtctctgatcgatccatgcagatggagttttttttttactgtagtgtcattatcctattcatattctattctatctcttccttcctaaatttgttagtattttatttctacttctataaatatagctaatatagcttgtatttcgtatccaacaataccaatca

SEQ ID NO: 51454 - DNA, 2893 bp, Oryza sativa
tctactattataaaaattaaagatgtttttaccggtattttggtacgtcatccgtgtatgagttagtttttaagttcgtttgattttggaaatacacactcgtatatgagtcggtttttttaagatcgttcacttctggtaatacagaaggaatcatataagaaatatgtttaaaaaaaacttgcatcttaacttgagacgatcggactccttactgcagctcatgattttctatatatatatatatatatatatatatatatatatatatatatatatatatatatatatatatatatatatatatatatatccaagtgaacttccacagtgaatttcatcttaactaaaccatataacaataataagattaaaatagacttaacctgatgcaacgcacgaatatttttttctattttttctagtatagataaaaataaaaactaattacatagtttgtatggaaatcgtgagacgaattttttgagcctaattagtccatgattagccataagtgctacagtaacccgcatgtgctaatgacggtttaattaggctcaaaagattcgtctcgcggttatttttcattcgtgtccgaaaaccccttccgacatctggtaaaacatccgatatgacatccaatttttttttttcccaaacaacacaccttaatgcattatgcctttccctgtgcaactggtgctatctcccccttacccttagccttactcttgcatgcatataaggcttaatttattagtaagcttaaaatatttcttctcttggattacttatctggtctaccatccaaccacatcattgtattcgttgcaattaaatcattacaataagatattgcatgattatattctaatgaaaggaaaacatatgtttcaacaagtatttcaagaaaaaatgttttaatggctaaatttgttttcaccatgtaaaatttaatgtttgactggtgatcaattaaaacatttgaccgctaatttttgggaggaaatcagacatcctattggtagtagctttggttgtaagaaataatctgtacttattttcttattcgatagatcatatatatctatttataccaccaccataaatattggtaatgaaattaagtgagtataatttattatttttactggtagtgaaatacatgaatcaatgactaagactagttctaccgatgagactactatataacctgcacgctgtgggtccatacccacgctaatactagcctgtgtacattgttatcaccatagttatattgtgatgcccttctctatctaaaggattgtctggtaacagattctgatactaactccatcccctaccactattatataacttaaagtttaattgtaactactaggactgtgtatatttgacacttattctaatatacgccacatagatcatagaatcatcatgttgatccaccgatcctttagacttgagttgtcttctattgcacctccaccaagaagcgatagttagcctcctgacgaggttgtagtaagcttacagccactaaaaatagtaagcttaccgccactaaaaataatagctatctcataaactactactttagtctgaactccatatgcaatagtgtaccctcacacctcgtaaagctccgactccaccttcactctagccatcatcaaagtcatcttgcccttcataatttcaatagtattcttattccaaccagcttgaaatattgacccttcttcatgcaaggtttcaaactaaatcacaattcttttttgccctgatgcatgcctggctccttgaagaacatattcgcctccatctttcgtcttggttttcacttctcctgctcccatgactagataccctgcgtcatgcctaagtagacaaaacaaaactcacttgactgattggcatgaagagaatcattccttcctaggtatcacataaaacgacccaaccgagtacaatatataaaacgacccaaccgagtacaatatatgcgcttccggcttccgcatcattaagctatatgattgataatgtaagaagatcaccactagtatctttgagtcacttgaagaactcaccgcattaaccctaactcttatccttcagtgttggacaatcttgcttttatgtcccccaatcatcacatctaaagcaatgcaccatattccttttttatttttctttaccttattatgccctgcatgcttttttttgactggcaaaccttctacccgagaagtttcatgttcttcgtttctttctcatctgatcagaaaacagcaacatagaagtgatatctttaacttggattattttcatacgttatagtagtcaccacatgctcatatgatttaggttattaactttcacacccatctttgcattgttcacatgttctggcggatctgactcttcctatatctttagccctaacaaactcatgcttcaaatacatcttattagttagtcttggacataaataagtcaccaactttttttttctaaactgtctttggtgagctctccctcgtcgacctgaactgagacataaccgtatatcatcatatggattgatatcctctaacttacttccccacatgtcagtgactcaaaataagagggaagtaagttagaggatcctcttccatcaacatatatagctgcctgcaagtacatctccctggcctcagtggtcaaatctattgggactatcatattcgacacttattctaattatactacctgcagtaattatgtgaattagaagcttgtaacttgtaagattttgctaggacaatattttggatgttggcaataagctctttaaacataaatgcattcatatcttagttcatcaccatataattaagggaaa

SEQ ID NO: 51455 - DNA, 925 bp, Oryza sativa
atcgataacatcgggggacccaaagaatctctccatagaaggggcgaatctcatcttagttattcaatatcccactacatgtttcatagcatacccgaagactacttttataactacccagttacggagtaacgtttagcagtccctaagcaagctactacacatgttgggaaccatgataatctcaggtctaaggattatataccaacactaaatgagaccactgatggcacaacacatatacctcttgcagtgtctcatattgagtctatccaacacatgttccccaacatgtctctacattattaatttggtatctccatatcatgatccatgagacatgatcatcaatcaatatatgtgctgatcatttaaacatatttattccacatatgatatttgatcagggatccattagaaatagcaacatacaacataaagagtctcatgaaagaatcacatatattaatcaataatgagttatctatttcaaggaataatgtcggataaatatgtaaacatagtatatgatacaatcatctctatgattgcctctagggcatatcaccaaacctcaagtgacctttgctagcttctctagaaataatattttggatgggggttctggagtctggactgtgagatcagcttctccatggtggttagcaggagagagcagcctctgcagtgatgctagtttgcagccgagctaggtcagcaaaattgggtgagaatggcaagtgaaaatgatctgaatgaaaggatggcatgaatgagaaatgctcaaaatcaacggcatacatgaaaaattaaactttatttactggtgtaaattatttttttcttattttgtgtcactcctcaacttaattcatttttcagaagatttttatttccccctcataacaggttttagcaagacact

SEQ ID NO: 51456 - DNA, 665 bp, Oryza sativa
atccaaattttccttttgtgagtaatcctgtaaatgcactgcacagaaggaattttaggttttgtacttattcctacaaatggtatgtgctgaaagaagaatttactgatggttagtacttgataccttttgatacttcttgacaatttctatccagagactctgcatgctttcttttatgacctccagaaacctgcaaggatcactgagggtttcagccctcctgaaacttcattttcaacaattaggaagcattgaagcacactgtaaccatctcatgcttgcatcaatattaatttgacatagacaaatgtatccgttgaagctctatttggccaaacagaaaataatgctagtatttttgtcaccagaggatgtaaaggatgtttgcatgtaagtatccttaattaaccttaactctttcatacagccctaaattcacttggatagacttgcatttgataaactaacagggttcagatagcttgctttagggaaagttaccagtgttgaatttgtcagaaagtatgtctcaatttgtccgagttatctgcatcagaatgttctgcaacatgtgtttgcccacgtcataatggaaaatggactccaaaaccaggatgccccgaccaagtgaaaaaaagatgttcaacacgtgtgcatttact

SEQ ID NO: 51457 - DNA, 5509 bp, Oryza sativa
caaagacgcactgtataattcattgtaaatatgcatagatgtcaatccatatgaaaatgatagccacatgtatttgttttacagaactaataaccacgtattggaattgattgaagtatcgaaattaatactttaagtataacagctgtatgcatgcttacatatgtatcgatattttcctcgtataaatgtgattcttaaaatggagaaaaattatcacaaatttcataagttcgttaagtcgcaatgaccacatgagagtcacaaacaggtactttctaggaacttaatgtgtgttactttagatataaaaactataacccttaaagaactgtgtaataaaagatataatggtataaataaattttgtgaaaaatcatcttatatcatttccaaataggaaaaatctaaacatgtgtacaataaatatcgtgccatagtttcaaagatattgcacatagttagcatatagttgacgaaatttaacaccatcttagaacatatgtaccaacccgtctacgcaatcaaccatttatgctatactatcccttttaaaaaaaataaggaagaagatgcaggatatagttctaaaatgtatgttgctctctagttagtactaaatggtatgttggggtttgctacttcattggttttcataagcacactttacagactataaatggtatgtgtttttacaaaatcatttctatataaaagttacttttttaaaaaataaatttatttttcaaatttacaatagcgtgtactccctctgtcccataaaaaatcaatctgaacatatctctgtccagattcgttgtattacatccgatcctatattcttttttttagaacggagggagtacttcattaattatatactaataatctcattttccgtatcagagaaaacagccccaacctcttttaaactcagccttagtcggacccaaatgatcatgcaaaacttccacgactacacaaccaattctgtacaattccgaccattttaaaccccagctcactgatcaccagacatacacccaaaaaaaattaattaacacatgtactgatgtacaattccattgatatttctaacaaaattaaatgaacggcatgatgtgcatgcagcaaacgggagcatcaaaatacatgacctgatggactgaagctgcagcctgtggcgatcctccactacctgaggcttcctctgcagcgagtgtagctcgtcgacagtgttcgccctcaccggtgtcgcgctgtcgtcgtggcacacgccgtcttcctccctcctgctgccgtatccgttcgtccccagccatgcttgcccgtctttcgcctccatcatttcgatcccttctgcaagagccaaaacaaacagaaacgaagcaactcaagaacagagtaatcgcttggtacaatcttatgatcgatcatatagtaatgggatgcttacagaaatggagcgagagtagagatgctgaagagagaaagactgaagttttcagaatgtggagaaagccatggttatgttggccttttaaacttgggaattaatggtaacaagtgaccaagaagctgcctgcggattctgacgaccagcagttgggttcttcaggcggcgcgcaccatggtttctccacgatgcttatcccctgtaccggtccttccgttggtacggatgccctgtcgttctgtgtgatgaaagcacagatgtcctctcgcctgagaaggggccaggtaattccggaaggaaaaggatatacgtgtaaaattataaaacttttacgaacaagctgtaagccttaactcccatatatagttaactcccacgtgtaattttttatgtacgtgttgtatgcatgcatattatgaaatgagcaccactacatgtaaacatgcttgaaaaaaatgtaggagaaattaaacgtcccccgaaggggcgggtacgcacatcctaactgaacactaaagccaagtctaccggttgaactaggtgagctaagtatatatctgtatatataccacctaaccattccgcgcaaccacataaaagcttatatgtgctggttgaaaatgggtcataggtgttaaatttcttagtcgacacccctcaagtggcactaataactttgtcattggtgcgtgctgattatagaatcggcacctacaatactagataggtgttgtttttaacaaagaactagttctataacccgactgttacgtggcagccatcataactgttgaatctatacaacaatcggcacttataatagcatataggtgccggtcgatggacggccttgaacatggcagcaactatagatgctagtaccaaaaaccgacacctatatgtcggcttgaaaaataaaaatgacagggcctactaaaaaaagataaaaaaaatttacccctagaagaaaaatacaatattttttaatttcattccatatatcagaatctaattaatatggcaagaagttaaacacaataatatatttattaacccagttggtacataatttatcatttatttaaaaccgtgcagaataaataaaatgaggattttatggtttacatgtaaattggaataacaaaaatgatatatatttaataatttaattactataacattatattacaccactctatactactctgtgagtattatttgaagcatctaataataaatattatgtacaaagccaattaatatcatgtcaatacttaatttcaaaattatcatgtggtcatcgaggatgaatctatggagtaattaaatgaacacaaaaaagataaaataaatttaactctacaagaaaaatacaataattgttttggttatgcactttatatgtatagcaaatggttgaattcaactgcaagagagaaatggagtgagaaataatgcaaactaaccttctagctgatcaatcaagaatgagaggcgtggtgtgaggtcatgtgtgtcaattcttaattagaatggctactttagatggcatctatgactgacggtcatcgtaggtgccggttttaaagtgggcccccaaacggctacttcgatgggacaggcctcaaaggtgccagttgctattaggaaccaacacctaggcgtcggatctccaaaatggcaccctgcggacgtgcactcgggtgtgaaaagtactatagatgtcggttctagtatttcgtatttctgacacctatccgacacctatagtactgtatttttttatgttatatagttgtgtgtggttacaagccgattaatggtctttcgttgctctaaaaccacataagctcatgggttagtgatttttttttgttaagtgcatgttttggataagtggattcatctataactttttatagaaaccaatccaaatgagatttgagagttttctatttgccgtataaatttcatcagaggccagtgacgtttcactggtatagaacaccctataggtgctggttgggaatctcacataggtgccagtttcccaactggcaaccgatgccactaaggcaaaactaatgaaatcataggtgtcggtttagaaattagcacctatgacgtccacaaatctaaaaggaaatctgagcagctctccattatccaaagcatcccgcatccaagaaaacattctttgacataactaggggtgaaaacggggcggatattaatttcccgcccgcccgactgacccgaggcttgcgggaggaatatgggagagaatgggatacccgatattatccgagttcgaaccggaatccgtaaaaaaatatgggttaggatacgggaagagttatatccgcccgtatctcccatattaggaaacaaatgtgaatatctattataaattcacctataaatatgataaaagattagttaatcactatttttataagctcacatgtaatattatataatttgttccttgatgcatcttttttagcactttaattgtcttcttacattaaatatccatgaattggacataaaaaaatatctgttcccgaatccgattcgaagaaagtaatatgggacaggatacgggatgagtgatgtgttatccgacactgcctgtacccgattctgaatttaaagtaagatgtgggttaggatatgggaatgttgtgatccaatcaccgtacccgccccgttttcacccctagacataaccatactaccatccatccaacaacaacacaaagaccccgagattgaaaggtttccaagaacatcgaagaacaaattaagttacataatcaaacatcataggtcaccttccaagaattcatatctagaaggacgagaacgacaccgccaccactgctcaccctagtgaagtccgcccccgaccgccgcttcttgctagtgtgacgaccactgccccccacccttggctagatctggccgccctcaagcttgtagctaccggatctagcagttgtcgagcttgtggtggccgtatctagaaggtcattgtcacgccccattttttgggattaaaaatcattaaataatgtatttctagaaattatattaaaagtaatgcaatttatcaagtgaagttaatgtgggaaataaaattttctttcaaaatcatggctggaaatatttttgtaatattctccatgccctgatatactctatgaaatttcccgtaaatttttggagctcaagaagtaatttcaataatacaaagttcattgaatcaattaaataaattgaaaacaaattagaatccttctttcattgtttccggccaaagtctactgttggtatttggtcacagataaatccgcaagtgtacggataccgctgtagcacattacctcagagtattccaaagatatcgaataagtgggaacgtgtgtatatctaagaacaggattcaatccaaggacaacaactgatgataggataggctagacaacaaacttaagtttaatgtaaaactctatcgaatgcttcaagcatcggccctcccttggtctgccaggctgagttcgtccttgagctctatgatatactcgaagagggagggatacaaaatactgacatggctatcaatacctgccgcctacctcactttctgtgaagcacgcaacaaacgaaggtaaccattaacctagacatcacacctaagttattgacttactactctagtcttgcgtagaaactttcttttttatctagagtcctagcactagactagttaattataaactaagcgatgaacccgtatcgatgagaatatatctcacttaagtaaactaactaaatggcactaaaaaatctcaaatacttcctttataaaagaaccatcgaccgaggtacaagcaagagcctgacaactccagtgactctgatgtaagaataccgacaaacctaaaacttctccgaaaattctcgaagagaacaacgataattttgggcactccttccaaagattctttttgaggagcgaaaccggtaatcactacgatcgtgcccacg

SEQ ID NO: 51458 - DNA, 743 bp, Oryza sativa
aagagagcaataatttagtcaacctttttaataacgaagataggagtattttattagtaagcatgagtttaaaggaagagagcagtaatttagtcaacttttttttataaaaataagtggtgccaaagtggctttacttggatggaatttgaagcaaaagggcaccaatatgaaaaagtgccgtaacagttggatggcaaaattgttaggcagcaaaaattagcggcaaaagtgaaaagtttgcacttcccttaatagagaaagctaaaatttttctttgctttggtacacctttttcccgaaatatatagattcttaagtcctaagttaaattgtccttataagttttggccaaatttattgaaatatatatatatatacaatatctaattagatccattatgaaatatatattttcatagtttacttctttgatgggttataggtatcaacattgttctccacaaagcttggtcagatagacttaggataaacccttaaattttaagatggagggaaaaagacaagccagaaaaaaactactccgtcctaaacaattgcatttcccataattcaaatttcagtacatttgtaatattgcaggttattttttatttgttttggacattgccgcaatttttaatgcatatgtttctagttatatacttgtaagatatattgaaagtataactatatgaatgtgtttttcatgaaaaatctatcgataatattttctaatgtca

SEQ ID NO: 51459 - DNA, 502 bp, Oryza sativa
aactagtctaagatcctcagagttgttagttcttgcactgctcatagccttatcccaggtaggcagagttgctgtagaattgagtagtaactgctcctgcaacatttaaagatttgccagggtcagatttcataattgcttagtgaaaattaaaggctaacatcattgaagattagaaacacaaacttaaacacatttaacaattaaaattaatttctatcagtttaatgatcatataatgatacagtatttccctgcctgtgtagataaaacaagcaaatatttacctttttgttaatacttccttcagtcatagaagtttaggacaagatttggtcaaacttttgaaattccagccattaatttcttataaaattgcttagttttgaaaacagaaaattatatgcatagatttgccttaaaaagtactgttataatatcatatacttaatatattttataaacttactgtaatacaaaattgatggccggaatttcaaaa

SEQ ID NO: 51460 - DNA, 744 bp, Oryza sativa
gaaaagttgaaaatttgtgtgtaggaaagttttgatgtgatgaaaaagttaaaaatttaaaggaaaagttgagaactaaatcagaccttagcacactgaagttggtaatttgtcaacaaagcgatgtggcgagacagggagaaaaaaatgggatgcatgcagtgcagcagcatgctggcactagcgagcaaagcagtactgtacttggtgtgtttcctgcaagttttgcaagttgctgctgtgatcagtacactgtgtgcaatattgcagaaaaatgcaggctcgatcactttcggttactaaacagtgcacggttttaggtacatgtcggaaggcatttttactactactacctgtcaatggagaacttaatcttcaagaattattttaaatgaactactactagaaatttgcaacactggatagtagcacatatattttagtgagattttaaatgtactgtattattagtatgcatgttattatggcaatgtttagttcccttcaaacttccaaaaattccgtcacatcaaatgtttggacacatgcatggagcattaaatgtgaacgaaaaaaaacaattgcacaatttgcatgtaaattgcgagacgaatcttttgagccaattacgccatgatttgacaatgtgatgctacattaaacatttgctaatgacggattaattaggcttaataaattcgtctagcagtttacagatagaatctgtaatttattttgttatta

SEQ ID NO: 51461 - DNA, 1600 bp, Oryza sativa
ggtagtaatagaaggctataagccagctataaacatattttaagaagataaataaggagagagaagatgagcgggctatagatttgtagccaactgtagtacaaattctaatgcacaatgtgtctatgatagatgggaccagatattaatagtatagtatgtaactattgtatgaattagctattagattgattgtagatgaattaagctagtagttgtttatactattaaacttgctcttagaggttatacgagtacagacaggacttgggttcatcattgcatcaagaatcttgacacgcttatcaatattgcagtctgcaccactttctgctcctatcgagcaacaggcaacaggccaacagaccagacgagcacctatcacctcatgcaacactgatttttggtacagtaaaacacttgattttcgttaatcccactggtgctactccgtagtactacatagccctgtttagatgggactaaaattaaaaattaaatccgtattacatcgaatatttggatactaattataaatattaaatatagattattaataaaacctatccataatcttggactaattcgcgagacgaatctattgagcctaatataaactttgagaaataaacaaagcaacctttctacttaaactctacgtagtaaaaaatatactactcgtatgacaaagaaaatcattctaaaattaagtttcaaaatttacatatggttaatgagcttaaaagtagataaggagtattcctctaacaacagggtctattgactttgcttaagagacggaggataaattaggctgcgttcgtttgtgagacatagggtgagaaagcatctcgttttcctcgcgcacgtttcccaaactattaaaccgtgcgtttttataaaaaaattttataggaaagttactttaaaaaatcatattaatccatttttgaaatttaaaatagttaatactcaattaattatacgctaatggctcacctcgttttgcgtatctttccaatctccccaatttccttctcctcaaaggctcaaacacacccttagtacagtgaaataatactcaagtagaatacttggtactactaatatataggcctggtttagttcccaactttttctttaaacattcaacttttctatcccatcaacattttcctacacatactccctcagtccaaaaaaaagacaaaccctgttttccgtgcccaatgtttgactatgcgtcttatttgaaaaaattatgaaaaaaataaaaagacaagtcacgcataaaatattaatcatgttttatcatctaacaacaatgaaaatacgaattataaaaaactttcatataaaacggacagtcaaagttagacatggaaacccagggtttgcctttctttttgagacggcgagagtataaacttccaacttttatgttatgtcatatcgttctaatttcaatcaaacttttaattttgacgtgaactaaacacacccatagagctagctggccacttgtacggagaatgcactggtttgtcctctggacagtccggaaggaatatgagtggaacggtcgaatcggcgttgtggg

SEQ ID NO: 51462 - DNA, 681 bp, Oryza sativa
gtatataagtttcacgtaattttgaatcgttaatctattacaagatttgttttggtgaggaagaaaaaaaatcgcggcacacacatatgtgtaaggatttgttcccacaacctccattttacggaaataacatattacagagatatttttgaaagttacatacaagttacactatagttagagtgtaattacatgcaagttacagtgtaattacactacgattgtactataattatatctgtcaaatttttggaagaaaatttgtcgacaaaaatatagcaaaatcgcgtttttttaattgaaatctatttcagaatcactttttcgattgataccaacaatcgacgacgaaggcctagcccggcccacagtccggcccgtcatttaagaggatcgcagttcttgagggagggagacaatcccaaaatcgagcaaaccctagccgtcgactcactccccttcctctgcgaccttgttgctgctgtctgctatggcgtaatggcgatgcgctatctggccggcaagttgaggagtactagtagaatgtgttcttttatgatggtataagcatcaaactgcacattaattactagtagtagaatgcatatctcacaaacaattccacagtaggaatttactgaaattccacagtaagtatttactgagaaagaactggagcag

SEQ ID NO: 51463 - DNA, 736 bp, Oryza sativa
ttcctgcagcccatcgataccgatcactcaattaaaggagtgaggtatatatcttatctacggctatccctatgttagtgaaagagtagtatgtttgaggaaagactaaatttaagagaactccaaaatattttatgaccggagttgtagtgattttatatttgtgtgtctactgtacacatccaatgacttttctctatccctatgtgcgcgcgcttaatcttcagtaaggtggataactcgtttttatcgaatgcaatatatattcgcgaaaaaagggccagctatcccttcctttcatattataaataattttaaattttacttgtcactttttttaagttgaccaagtttttataaaaatataaaaaaatattttcaacataaaataaacatattatgaaattatataaaatgttatagttttaattaaactaattttgtgttatagatgttactaaaattttctattaatttaatgtttatctaggaaaaaggtcaaaacaaataatgtaaaacggatgtagtataataattctaaaaggccattcaattgcaatattgtcgtatcgtgtaatgttgaaaaaaaaacaattttgaaaatgtacgggaatgtcagtatcacaaagactcaaagaggtaattaaacacgaggaaatagttaagattaatttggcatacatagctaattgttccaataaatcatcacatcaactatactgatagatgaaaaatc

SEQ ID NO: 51464 - DNA, 1903 bp, Oryza sativa
aaagatcgtcttttaattttaaaacctacagtagttattagaaatttcacaagctagcatgttccagtgtgtatgctaacagaaaaaaaaacgaaactttagctgataaagcaatggcttaacaacatagagaaaaggtttattggtaaacttttcatataggaatacgtatcttagaaatctaaaaaccaatattagaaaatactataattcaaaaaatccaaagaaacatttgaaaattactccaacataggagtaagcggctcgaaaaaaaaatacagtggggataggagcatccgagcagggagttcttatcgagtttgacatgcttgcgtctgcgctgctcagctcttaattgcttcgtcagggcctcaggggtgcaagactgcgagctagtagtaccagagtagacctacatcacatgtcactcaccttattaactgttcatatgcaatggccgtgtttagtttcaaattttttcttcaaactttcaacttttccatcacattaaaactttcctatacacgtaaacttctaacttttccaccacattgttctaatttcaaccaaattttcaattttaacgtgaactaaacacacccgaattatttctgtttatacaactatgcaaatttctaatagaagaactcataaatcaacaacggtttagaccacataacttcatatttaggatgtgtattataaaactataaatttagcactaaatatatcacgatactatagatcttgtgtcatttgtagttttataatatgtcgtattaaatatgtagtttttcaattgtttattcaaagtatatgcaattttgtggattttactctttcttggagttcataaagtcaaaggacgaaacaacacaccaaagtagatcaattatttgaattaagttttcaaaatttctaaaacctcaaaccggccagctggggcacgctagctatcacgttttaattttgacctaccgatagtacaatactgctcattcgtgttccataattcttggtatttttaatataaagttgcgatcgaacaattaaaattttaactataatagtaattaaactatttagtttaaaggcactcaaacatgatgcatagattagttttaaaaatattttagtaaaattaaatatttagttaatttttgtgtaaattttataaaactccacctattacagccaaaattacaaaaaactatagggattttgataggtggcacataatttcaaatattattatcttaaagttttacaaaaccaaaatatttatcattttaacttcggtctacacacttaatatttataatgttttacaaatagtacaataaaaacaaataatcaaagacatattttattggtcatgacgttgtctaaaacgtcagaaaattagctaggggtactagagtagtagccaaacaagaaacaattaaggaagagtttatatcgtgtgtaatatggttaaatgttgggcacgaaaatcagagtttgtcttttttaggacgaagggagtactccctccgtcccaaaaaaagacaaaccctgggtttgcatgtccaactttgactgtccgtcttatatgaaatttttttataattcatatttttattgttgttagatgataaaacatgattaatactttgtgcatgacttgtctttttatttttttttataatttttttaaataaaacggacggtcaaacgttgggcacggaaaccagggtttgtctttttttttttttggacggagggagtactccgtatagctagggcatatacttaaaaactgagtttggggggggagtggtgtgattaataaatctgcctcattccgacatttaaacagaagcatgcattcatgcttaattagcagaaagcatgtactggtgcg

SEQ ID NO: 51465 - DNA, 2116 bp, Oryza sativa
gatcaaatgttggatacgaaaatccataactataattaaaatggaacgaaaggagtactaattaaggttggctatgtaccaatttcagatgctttctagattggaggggctatatacatgcatgatgagaatagggcttgttagttgttatatctatcttgaacaattgataaaaagtgtttggagattcgtgacatggccctctttacaagaaaagtggcactagtacaatgcaatgcatataaacctttcaccctctctttagttcatgtgagatgataaacaaatggaaaggggagcctaaccacacctgaaacaatatcttaatatacaagtatctagctaggctataccggctaatagctagccctatatgatcgctttctcaacaagtgtcaagtagtagtgtgttatactaacggtgctgagtttttaaaataacaattgaccattcgttttgattataaataatatactaaattataagtcatattcaaagtttcattataaaacatatcacacaaaataaattatatttctacaattttttagtaggatggatagttaaatgttatatgttaacggtgtcctctctattaaaaaatacaatggcctatagtttgtatcacaatatgccttgttcagaattcagatttactagtgacactgtaacggacaatactaattagattaatccaagtattacagctcgtaattttccatacaactggtcttatattactagggaatataataaattggacatgaagagtctattctattttttaccttattacgcagacttgtgatagtcatccacatgttcatgacagaattttggagtaatgcattatatattctccttgtaaattttacagcaaaaagatgataacataaatgcaaaattgaaaacatgccattgtttgttaaattaaacatgccattaacccccaccatctaccacggttctctgcagcggacatggcatcctagtgttcatccctttttactccctccatcctaaaaaatacaacctcttactataacaaatctagatataagtacgtctagattcgttgtattagaatgtgtcacatcctctgtcaacgcctcaacattcaaatagaaaaaaaaagtttaacaattgaatctgattttttctgatttaaattttgctggaaataaaaatcaatgttatccctttcttgcaacaattataaggagaaacatgtggagcaacaaatggctagacaaatttgtgtgataatctgtaaatactataattatatattttttaatatatacactatagaatcctttcctacagtcctttctttaaagaaaaacatgtggagcctaaatttatctgctttcaaacatgaaactactcatcaaagtgatactacatcagatgcctctggtattatgtttcagtcattcctttcacctcttttaacctcctctgaacaaactcttcttacacatgctaatgataatgaatactggcacaattaatatttccaatgatactgaaatagggaaggctgtctcacacactgatctcacatcacctcactggttgcagtacctagcagggatgcggaaaatggtgtgggtacccacacatgtcaccaaagcaaagccatatgagatactccttccgtccaaaaagaatcaacttatgcccggtttagttcccaaaaactttttcccaaaaacatcacatcgaatctttgtacatatgcatggagtattaaatatagataaattaaaaaactaattgcacagttagaggggaaatcgtgagacgaatcttttgagtctaattagtccatgattagccataagtgctacagtaacctacatttgctaatgacggattaattaggcacaaaagattcgtctcgcggtttccatgcgagttatgaaattagttttttcattcgtgtctgaaaaccccttccgacatccggtcaaacgtctgatgtgacacccaaaaattttcttttcacgaactaaacgggcccttaggatagaatatgatttatcctaagacaacaaatctggacaaaacacttgtctagatttattgtcctagaataggtcacatcttatt

SEQ ID NO: 51466 - DNA, 854 bp, Oryza sativa
tttcatataatgagatcaatacctccaaaacagtttttttggtaccaaattaataattagacaaagatcataacctttcattattatacactactaccaaatgcgtaaactaacaaacttcattggtcccatcaggttgaagctaggtaggttaaaaaaagatacaaatagaatgagcacgaagttgacttcatgtataatcaacttttatttaatcctatcaattgacttcaacataagttgatctcgtaaccggcattgtacaaaagaaaaaaaaagagcacaaattttaaatgaccacattaattgactgtccctgttactcaccttatatatctgtggcatgcatcttacttaatttcttctcttagtagctagaaaactgaatacaagatctgtcaaaaatgatgccacataaaactatcgcattcgacaaaaatttagagataaagttttacatattttagaccgttggatccacaccaagattcgtgtatgggcttcttctcctcctactccagcaaactccccctcttttccggagctggcgaggccccaactccagcaggtataacatacggagcaagaggcacgagagtgagtggtggcatcgagagctcgcaccgtggtggtggggagggaggaggatggaaaagagagaggggttaaggttagggaggcagcactaatcttaaagcattcaaatggtctaaaatttgcaagatttaaagggtttattttatcaacagtcaaatagacaatccctaagactataccctatattctttattagatgtcgatttaggatgtgtgtgcaattagctttgtaaacattgcaccatgtgtactcaaat

SEQ ID NO: 51467 - DNA, 1132 bp, Oryza sativa
cgtgatccatgtacagtagtagtatagcaagctagccaggtacgtatacgtacgattttgctctagttaacttgtacacatggtcaatccagtacggcagtacccacgtacaacaaccggtagtacatgtatacactgtcaacataatatacagtaagctggtgatttttttgattgacaaacaaaatacccatactttgctatcagctagctatgggtaaaagaaattatattgtaatattttttatcaaatattttatccgtcctaaagtataagggattttgatcggatgtgatatatcatagtactacaaatctgaacatttccttttcaaatttgtagtattaggatgtgtcgcatccaatcaatttttttttatattttggagcggagggatatgttaatagcacttgtttggttctttaagtatatgatattcacttcctcaaattgaatattagactatttcataatatctggatatataagttgtaaaaacaacaaaagcaatagtgggatgggaggttcactcccatcatcattatagccttttattaaaggtgtatagattttttacatgtgctttgttttttaaggcattctccccctgttgacataagaagtcttaagcttgctagctgttagccatgatcatatccaggcacatttgaaatgtatgaatttttacataccaacataaaaatgttttaaaaagtggcaaaataaagtagactaatactactccctccgccccataatataagggattttgagtttttgcttgcaccgtttgaccactcgtcttattcagaaaattttggaattattatttacttttttgtgacttactttattatcaaagtactttaagcgtaactttttattttttatatttgcatgttttttttaataagacgagtggtcaaatagaataagcaaaaaaattaaaatcccttatattatgggacggagggagtagtacactaacaacagtttgagaacagtatgcatgttcccttcattgtctagctagactacctgatctttgcatgcatgcgtacgtatcaattgattactgatcaaagggaagctagctaggtactagtactagtcggaagcatgcccaaatca

SEQ ID NO: 51468 - DNA, 743 bp, Oryza sativa
ccgcgagagctaacttggtcgatcgctcccagcgtagccgaatgcccctctaacatagaaggattcgattccgaccaatatatacgagtctaattatactaacataacatacttgtagtaaaaaaaaattcggatcgaccgaaccagctattgaagcggaaaagaacaaaaccagtaacccttatggctcgatttactatgaagactgtccttacaaactagtcagagtgaaccggtgatgaggacatcctccactattacccgctggcaaagacgccaaagttgggcggcgaccgtgtgagcctttgaataatcccaccttgcttagcttgggaggaggaagccaccttaaaagggagagccatcctttccctattggactaatcttttagggagattgggcatttccctgagtgggtccaggcaaccttaagttattgggcctcggccaaccccacctgggctggattgttatcaaccgggcgtttaactgtataaatcgtcaaactaagacataccgaaccggccagtttgttgcacgatgggccttcacccatcaaaaagaggggttgttagagcatagatgcagccgaaccggccagtttgttgctcgatgtgccttcacccatcaaaaagaggggttgttagagcatagatgcagccaagatagtatactttatggaggctgacatcatcccacatattttcttcctcatcacaagtctagcgtcatcccaccccta

SEQ ID NO: 51469 - DNA, 755 bp, Oryza sativa
taattgagtgatcggtatcgattattaaacactgcaatagattaggtaattccgttcattatataaagcaatacgtattgccttaataataagaaaatgttagggtcggttatctctctctctctctctctaataaaacactctctaaatagtacaacattacacatgttctcaggcaactctagtactagtgttttcgtcaagttcggtccacggaggctgactaaaattttggcccacgaaaagtaattctcaatcccacctttccccgggcatgcagcaacaaatatgatttttgagtattcgactttcttttgagggttaattcaatcctgccattaaaatttgctaatccattacaaaattgctaatttgacaaaatgttattactattcgcgatatctcaacaacaatgacatacaacggtgctggctccggagacctctcgtcgcagatgggaggtggtggacgatgacagcaacggctctcctcccgccgtagataggaagaggtcgaagacaacggtggctcctgagccctcttgttgtggatgtgaggaggttgacaatatatggtgatggcaacggcggtggctctcgagccctcctaccacggataggaggtggtcaacaatgatggtggtgaaaacggtgacttccgagctctcccgtcgtggatggggggagatcaatgacggatgcagcaacggtggtggctcttaagctctcttgctctagcttgcttgagctcgttgt

SEQ ID NO: 51470 - DNA, 756 bp, Oryza sativa
tatctattggctggtccagtccctcgattgattaattaatactccctctgtactcattgtactcataaagaaagtcgtttaggataatgtttaagtcaaaccttaggaatataaatcacgaataactctcaagttattgattttgaaaatgtaaaaattatatgaatagatttgtcttgaaaaatactttcataaaagtatacatatatcacttttcaataaatatttttatagaaacaagaagtcaaagttgtgttttggagaccatgtcgctgtcctaaacgacttcctttaggagtacggagggagtatactccatccgtcccaaaataagagagattttagatagatgtgacacatgtatcctagtactactgcctgttcagattcgtagtactccctccatccacaaaagttacgcatattacttttgtcacaaagaccaatgagaaattaaatcttcttggatgttacaaaatcaaggagtgaatgcaagcatgcaaccaatgagtatttggatgactccttgggttctcataaaacatttaatttatctcttcatttaagtcttaaatacataaagactacaaataggaacaacttatttgaaaaactcaaatgtgaaatatgtctaacttttgtggatggagggagtactaagaatgtcacatccaactaaaatatcttatattttgagacggagagagtatgttgctagttgagacgctgtctctctgggttaattgcatggcgtag

SEQ ID NO: 51471 - DNA, 602 bp, Oryza sativa
tgtttccactatgggttgctctaatgtagcacaagtagtggacatagttggcacatcataattatgcataccttgagtagttgtagcaccattatcattacctttttttcttatcttcagaaattataggcacttagtcaattaaacattcctcaagtatgcatgaaactatggataggtctttttgctctccatctttcttctcttcctcctcatcatcttcaacattggaggtgctgatgtagccatcttccgtagcaacgtatgcccgttgactagggcaaaccttctgcatatggccaaatccttggcaatggtggcactgaatgcgtcccgttgaagcgacggatgaggcactcttggcgggtacctgcaaagaacttgtacctaaatctgcaggtcgtggaggaggtggttttggcgctgtagaaactccagacgcaactggttgcttgcacgctggtgggggcgcccagaaagagataggcttgggcagactcgaagatggcgtcgtgcgcggtgtgtacgtgttcgtcttgttcttgacctgttgatcatgcccctgtaattccttctctgcaagcatagcaaactgaaacaac

SEQ ID NO: 51472 - DNA, 683 bp, Oryza sativa
cgtttacagatgaaaaaaagctagtcacagatgagtactccagaaaacggcaccctgacgagacagcagcaaagggggactctggatgcgggcaaatacaggcgttcacatatgaaaagataggaagggtgtgtttagttcaggttaaaattagaagtttggttaaaactaaaacgatgcgatagaaaatttgaaaatttgtatataggaaagttttgatgtaatgaaaaagttagaaattttttaaaaaaatttagaactaaactcggccgaagatttgtctccaaatatatatacagtatatatttacaggagtatctataactgtaaaggtcaatgttaacatcagtggagcatgacaatctaccctatcccctgtcagataggttgagattaacatcatctgtgtttgtactggttaagagatcgatagtatccatctgcagttactgtctagtgtgctgtgcacagtttatatggattaactactgcccattctcttctgacctctctttgttttagagggggtggacaaaaaatattatatggattaattaatttctcattcaatgagaatggttgaagataaggtggttaagacaagattggatgaaaattaaaatgaaaggtggttattggtggatataatactttataaatagatataatatcttgggacaaag

SEQ ID NO: 51473 - DNA, 4803 bp, Oryza sativa
tggacatgaggtgattaattgggtatgattggctggtcattggagactatacgatgatcatttttctgaagaacctataacttcctgtttattttagacgcatgtattagtgaatagtattattttttcaatcttgatttgaattggtgatgcacatattaattcttatttctaattattgtgcaggtttagaatgagaagacctcttttttacacataatgattattgttaaagtgcatgatgattattatgtgaaaaaataaaaatatggctggtgtccttggactatcatgtttctaaaaggtaacattagtgttacgtatggatttgataaagaatggcaatgttattatttttattttgtattgatatgtgtgagttaaatgaaaaaaaatattccgtaataaatttgtttttagctccatttatttgtctttataaacggttccttttatttatcttcaaatctatagttttgtgatatatcttattaaatatgtatatttttttataatctgaccaaattacttagggcccctttgaatcaaaggatttatgtagcaattttataggattcaaatcctataggaaatttttctatttggccctttgattcaaaggattgaagctttccaaatcctatgaaattcctatggaatgacacattgcatgtggattttggagaaaatttagcaagagctccaacctcttggaaaatttcctttactctatctctctcatccgattcctacgtttttcctgcgctctaatcaaacgaccattcctgtgttttttctatgttttgcaatactctgttttacactttaattcctgtcagaatcatgtgtttttcctattcctctgttttttcaacactgcgatttaaagaggccatatagttttattaaatttactctaacttgttttttcgtgcgggaatacctctggatgactgatgacgtcagatcacctagaattgtcgataattaatgcggtcccttttcccgtcatgatatgtgaatagtgaaatctcaccgttcggtgaaaagaacatcagtacttcctccgtatcgtaataagtttatttttattttatttatttcaaaataagctcattattaaataatcattacatcggagtttataagaatataaataattatattgtgagaagataaaataaacaaatagttgtaataaaatttgataaaatagggaaaaaataaatttgtttttgaactgaggtattaattctggaagaaggaaatctcctaaagaacattagtattcacacatacctttcactccttgttttctctctttcgatgagtcatgaccgacccgtccttgatcacttaatcatgatacggtgaaaaacatactagtccacacgagttcaagggggagttgttgaatgcttctccgtcttaaaataaaatcatcgttaatcctttgtcctaaaaaagaattaactttggaattatcattccttcaaagtttataaaaacagaaaataaatatattgaaactagataaagtaaagaataattgtatttggatttaacaaataaggggtattttagttttttttaattttgtgttgatataattaggatgaataaaaattaagaatattctgagactgagagtatggagtgaaagggtagcttagctatgaacccatgatcactactagtatttggagattttaggagtactgttatacgtacgattcagctgtataacttactagaaaagtgtccgtgtattgcaatggtaaaaaaaaagaaaaaattgaggaaaagttgagaaagataatgtacattgtgtaattaattgaaataccaattttccggaatatttgggtattttttaagtacgtagtagtataattaaattaatttacaagcaaagtaagcgtgagaaaattaaccatgattaataatagtctttgaaaatttcttggaatttctagaacttaattgctaattttgataatacaaacatcatctttatttaaataaatctaaataaaagtccacatttctcttcgggtcattttccgcccattttcttcttcagcccgcaaccgagcggcatgctttcctctcttctcctcccctccacctcggtccgcaagcaagcgtccagcccaacgtacaagtctaattagtcatcccaactcctcctctcactgtcgtgtgggccccaagcaaaattctagcctaagcgttgtgttagacccgctagcccgcgcgcggtccatcaagcgtgcatggcccagctgatgctggcctgacgtgggatcgatctgagccgtttgtttttgatggatggcttagattggttccaaatcaatcaaaaccaccggtacaaaaaaaacctaaccctaattcattttccctctcccacttcccccaccgtcggctgcctctccctgttgcgccgcctcttcccctctgctgctccctctccgctgcttcccctccgcctcctcccaccggcggcgcctcttcgcctctcctgtcctctccctaacggcggcgcagctccccatctcttctcctcccgtgttgccagcacagcgcgatgacgacaagagtacgacgcggtgcggcgacggcgggggtacggtgcagcgagggcagcaatggacgtccctccccctctccttctccctgtcggccttgatggcggggtatggtgcggtgacggcaacaggcgacgacggcggtgatgccgcttcctagcgaagggccggacggacccgcgctgctcccaccggtggcttaatgctccatgaatccagtatgtgattcgaattgaaatttcccgtccgttctcttttggataactgaaggtgactccgcgtgcaagcgccgacggatgaaaacggatgaaaaatttaggtgacgaatgcaaaattaccgattttttaagaagttaagatatacaactagagatatataatcatagaccaataaaaaagaacatgttcatatgtattgcagccgttgctcaattttaattatatgtgagtcggacaattacctggttttagtttgtcaccgtcagcattactaaagctagtcacaagttgagaagaaaacgacaccctgacgagacagcagcaaaatggcgagaaggctacatgtgtcgcgcgcggagagagagttttccgtttttttgcttttgaggagtcaagtgaggaggacgaggattttgatgaggatgagtgatccactctgtttttcctttttggtgccttgatgccaaagggggagaaccacctatcaaaaaaaaaaaactatcccctttcgtgatggctagtcgaaccttgggcttttgtgtcatgtttaaattctttattatgcatgtttatgtcttgttgaactctataggcttgaatgatgttacgtggaattatatcttatccatgcttaaatgtgtgatatatcttgtcatttgcatatgcatgaggttatattgtcatttctaatctattgcatagattgagggggagctctcctattcatttcaagcatatctttaggggagctccaccaaaatcctaatcttttattatttctaattgtgttgtcatcaataatcaaaaagggagagattgaaagtgcatctagtacccctcatttattttggtgttgatgacaacacaattagaagaaaactaatgctttttgttgagatgaatgcaaggataaaaaaggagtggaacttgagtttaaaagcattgtggcatcttttgtggtaatcgtctttctaaaccatgtatatcttgtgttcttgagagtattaggatgccgtactattaagagggataccacatgcatataattggtagaacactagtgctcaaaatcctttacttgaagtgttcttgaatttatcctgttggactatccgattttgatcagactatccgatgctcagactatccgaaatttcatagaactttgatctctgtctttggtctaagtgttggctaaaaagaattggactatccaatgacctagagactccgaaattcaatggaacttgagtctctgtaagatgatgaaattcttgcttcaaaaataacggaatatctgatatgacatcggactctccgattgatcggattgtccgaaattctccagaattttgtcctctgtctcgggcttgcttgggggtcaaaaaaaacattagactatccgatgtcacctcggaaagtccgaggtgggatgaaaagagtctctcctaacggccactttttgggggatttataaatacccccaccttttctagggttacccaactcattcattctcattcactttgggttgagtttggtgctaaggtgctttggatctttgagctctttctccctctttcaaatacctcctcgttctttgtgtggtggatcttgttggttgtggatttggtgtttgaggacctagtgtgtgtttcactcgatcttgagcactagggtttgaccaagagttgtgtggtgtttgttactcttcgaggtcgaggactcctagacggctaggtgtcactcccgagccaccgatctacgtgtggttggcagggagaagtttgcgaaggccggatcttgcctccacaaggaaagagataccccttagtggaaggaggagtgcttagtacaacctctttaggaaagggttagcaaagacctggctcttagtgaactcctcaacggagagtagaatcccctcaaggatttgaactcctggaacaactccgcgaacttcatcgttggtgatctctctatatcctctctt

SEQ ID NO: 51474 - DNA, 869 bp, Oryza sativa
caaatagttgaaaataagtaggtctaaacaatgcaataattattttaagcaaacatatattttaaaggtcggagcatctgctttaataattatgtaaatcatctgaaaagaacgaagcctagcccataaacgtcaagaaatcatgagaaaaaaaagaagcactatatacttattctactatctcactgaagtttaaattctattaccttctttacgcatacatgggacgtttcgtgctgtggttagagatttaaaccattatcttcacttcaatgtgtggcattccatgttatcacaaaatatcggtgcgggttttccctattttacgtccttttaatggaatacaaagcccaatcatttcatattttcgcttatgtttatgcttataagctaatattaaaatataattttgtactaggagttgattttatggttttctgatcatcgtagtttccaacatttgcttttcaatcgttaaagacacatatatataactcataaattactttctagttgataacaagcggttcggatatgcatagtagtttgtaaatgctactataatttgaggatgttgtatatccataatgatacttatacacatttatatcgagacactgcaatattggccgaaaaaaaataagaaaatgtaatggcttagggaaagcacaattgatgtgatagtgtagttgtgctagtgcagttatgagtacctgactctactcgctaggttcaaatacttgctccgtaaacataattatatgtattaattggtgcaaagtctaaaaaatatacttccactaccataggacagggtatcccaatcgatccatctgtgagtgatgaagacttgaggcccgttacaaagg

SEQ ID NO: 51475 - DNA, 622 bp, Oryza sativa
tctttacatattctacttatatgatctatccactataaccagtcagatagtccagccgtgtgggtatacggtacccattatctccacatgcatcaaccttattttatataaatttattttcttgttgcttgatctgaattatgcatcaaccctatttatagaaagaatagtccctcgcaatatgatttaaagtaaaaacagaaaccaagagaaaacttatctctagaccaatttatttatttagccacttttgatattattcgtaatgggcaagggcactagaccaagttatttattatccagtttggatcttatatgtaatgggtaagggctttaaaaaactatacatctatgttgctaccctgcagacatattttcagtccattaatagccaatggaacaccatgggaaacagcagttacagctgttaatatgcgatggcagggaccagcattagtagcaacaatatttacctatcaacttatatatcagactgaatgctagttcacctctattcatgaatacataagtgtggaatttagaatttagcaaatgcctatcaagtttctttctgtcccaagcaaggttttccctgttgtacaccttctcccctatgctggtg

SEQ ID NO: 51476 - DNA, 584 bp, Oryza sativa
  unsure (1)..(584): unsure at all n locations
tgataatactagaagatccatgcagttttttgagtacatactcgatattctctgctatatatcctgccctctagaaaatatttttcaggaacaattgagcactcgagtaagttgtggtcgagtacaccacattatcgagaacgatctcaacaaatgcagagtcgtcgcgcccaacctaccaacgaagaccgacnnnnnnnnnnnnnnnnnnnnnnnnnnctggactactcgagaaaaggttgttaacggataattcctagcgaacgtcgtcggcttgatcacctgacatgattgtgaacggacatccggatatgctacaagttgggtgcgtgagtcatgctggccacatgagacgcacataataaaccaactctagcacttccattggtgttcgagagatcattctacacgttcgctggtcctcgaaccaatacatagcaatctctcgcaccgcaagcttccatcggtgtccgagagataattctacacgtttgctggtcctcgaaccagtacgtagcaatctctcgcaccacaacctccattggtgtccgagagataactctactcgctcgctggttctccaa

SEQ ID NO: 51477 - DNA, 662 bp, Oryza sativa
cttataatgcactctggtgcggtttagcgctatatatatatatatatatatatatatatatatatatatatatatatatatatatatatatatatataggcaaaatttgctacaggacactcaaaaaatatgtaattagctgtgggacatcataaaaacgtgacttggctttaggacactttaaaaaagatgtaatttgctaaaggatactgaagccattactttattatttcttggatcaaatggagagagcaattttttaaaagacgataatgcccctcagacctctctccttcctcttgtctgcaggtaaaaaagagaaagaaaaagaaacaagccgtcgtttcacatgacccacacaacaacatacaacagtgatgtggtgtcctccatggaggaccaccgtggcgagggcaacgatggcggcattcgcatgatctcctctgatgagctatgcaagcatgtggctgcatcagatcgcctaaaacaccctattgataaattgagaacaacaaaagattttgctaccaatccagctgaggattcgggatggagggagggcacgccaggatggtgttgatgatgaggctggagaggaggaagaggagcctaagctggagcacgacaagcatgagggacattgcatggctggctctgccgca

SEQ ID NO: 51478 - DNA, 3464 bp, Oryza sativa
gatatttaatctgagcacaaccttgaagtaacagaaagccagaaaatcctcagagaatgtgtaagaaatgtggcaaaactatataaaatttcagaaaagaatactattatgccgagaaaattccctatatacccctgaaaatttactcaatcccttcaatacccctgaatttgacattatcccttatatacccctgagttttcattttgatctcctctatacccatctccgttagttgaccattagttgaccgttaaatattttaaaatgactatattacccatcctatacatatgtgtggtacctacccaataaattttcatatgaaaaataaacttatacaaaatacaagcaatataatcatttaatgcccaacttaaaaaataaaacttattattttttattttttaaaaattatgattaaatccatacattagtttcaccagaaaattaagagcaaaaactaaatgttatttaggtttaaatttttgggaagatatacgaaattcatcaaatttgatctgaaatttatttaaaaattttaaatttgttttctaatttgtgataaactaattatatcccctttgttttttcacaacgaatcttttttcactaaatatttgttgaaaagtaattttcaaatcttatgcagaacttttttttacaataaaattttttttattttaatgaaataatgttttattttcaaaaattcataacaaatatttagtaatttattccttattggttttcacaactcaaataatttacacataaaacatttctagcttttaacaatataacaaggacaataaagtaatttctacaataactaacggtcaaactaatggtcaactaacggaatgggtatgtaagggatccaaataaaaactcaggggtatataagagatcaaacaaatttcaggggcgtagaagggattgggtgaaattacatgggcatatagggaattggccccttatgccacctataagacagcaatactgaacagctgttcaaaagtcaaaaaaattccaacgatttccaccaaagttttctacattattatttttttacttctgcgctgattaattcatgatatcactttgcatatgtttcaaaatttctttaatacttgaagattgataattgtattcctgttaattccattctaaacaaatagctgttgaattcttgtcatttgtattgtgccttcacacatttactataaactgttcaagatgtccacatatgatcgattaataactcgatctttatcatgatgaattctagagggatgaagaaattagtatggcaccagaggaaccagtactggtagacaacaacaaccaagaggaaaacagtttgcaacaattgaatctactggctgatacatcagagtggttcaagaacatggatgatgatgatgagtcacccctatggctaaacgtactgctgagaaccgcattctggaggaagtgtgacgtgcatgatcagcttgaaaatacacatagggctgaggaaagcatcttctgcaccaactgcctcaagacaatatgcccacactgcaaacatgatcaaccgagccaccaactcctcaaggtccgccgctacatcttccgcagcgtcgtccatgtcaaggacatgcagaattttggtattgacatgtcttacatacaggtattacttagataaaattaatgcccatgctttgctatggataaaagaaaatatattataatatgcaatagatattttaaaattatcgaatatgttagtatcacttgtttacttgtttgaatatatggtatttacttgtttgaaccaaatatttggactattccataatatcaaaaaaaataaaaataaatcaggagcatatttgtaaaaaactgtaaaagcagtggtgaggggacttttaaaggagtatagatgtatagttggcactgtggttaatcaacttggaaagttagtttctctagctccaactagtttaattagcttgtttcgaattaatcatgataagttcgtttgtgtaaggtttgtgtgcaataaatctttgttatttaaaactcctaatttgatggaagcaacaacaaattataatctgatcactatttgcttcatttttcttgtttagtcctagcattagtaatgataatttattttgcgacaatgtgggtttgaaggcaaataggctggtctccatttagagcccttgcaaacccatcctaactggttcactgatcagctagctagaccacacaggtcagacacaatttgacacaactttgtttggaaacaatttgacacaattagagtcgatcaaacgcactgaatttataatgaaatgaacaataatttttatatataagtgattgcacagtagcgtagtaaaggatgtgtcttgcggcctaatactactaggataaatggcaattaatagtgtcccggaggtgaatgccatgatcatctgaactcaacttttttttatttaaattactaccattctgaactcaactttaggctagaaataaaagatttaattttgttcaaacacatggattgattagaaaactgttttagctcatctgaaatgcataatttggtgcatatatatttattgattcaaaatatgtatctaattaatatcatgtagttatgcaagcacatctatgtaatcaaaatatttacaaagatatgtgtactcatataatgcatccatcacatgaagtgatcaaatcttcttatgaccatattacattgtataattcagtaataacttagtgaaatcttgaaaacatgaaagcacacattttttttttgcctttttagctttcatgtcactaagttattattacgatcatatcagttttgataattcagtaataacttagcaacatgatttcccatgaaatctcgaaaacatgaaatcaaatattttctagggttaagttctggacatatatacgcagaaataaactgcgatagttgcatacacagaaatagttataaattaataacataaatatttcacatcgaaacctaatagtgttactgaagaaaatcgatcggtaattactacacattttctcacatgtacatataatagttaatactacaataacaaacttgatcagccacttactcccccatatatatatgtgtgtgtgtgttatcccgcaatgctagctagcattagatcgatccaaaacctccaactgtatcggttcttcaaaaatcttttttttttgcatttgatcaatttgtactaactttttccaaaactgattgcattttctcatacagaaacatactccctgcgtcccaaaaaaatttcaattctagggatgaatctagactcttttttttttttggggggggggggggacggaggaagtacatacaaatacatcttgggaaatcatgcatgtttggtttgcatagtttatgaatatattggtat

SEQ ID NO: 51479 - DNA, 516 bp, Oryza sativa
cctcaagattgggtacgtttctttttgcaaagacgagcaaatgctactacctccgtcctaaaatataataagttttaggagtggatacgattattaagaaagtaggtaaaattaaatggagagagtttgtgattggttgaaaagtgcagataggtggaaaaattgaatgatagagaattgtgatttgttgggaagagaaaacaagacattgatgaaaagtagcatagactttgggagatattgccttcagcaccccttgacccttctcttcctccctctcatctgctttctctctttaaattccgtttgtgcataactgagatattggtcaatcttcaatcctaatacataggtatatgcgctttgctggtcatatcctcaatcctaatacaaagatactcactttacgtataaaaaaatcatcttctcttaagttgccaaacaagctgttaacggttgatactaagttttaaaaaaaatactaaatgaaacacaacggtaagaaaattgttagca

SEQ ID NO: 51480 - DNA, 655 bp, Oryza sativa
ggcggtttttatagaaccgtggatcccccagccctggtagctggaccagcatgagcaggagcacgacagccatggcggcgcccttgaacaccaccgcggacgagtaggcgatcaccgtgctcagccctgtgatgaacagcttcgccatggccattgccatcgatcgcctcttgtctctgttgttcttttgcctgaacacgacgtgttcttgagattttttgatgaaaatttgttgaacacataatgtatgttcttgagattgagcagggagaagagatcaaagaggaagagatatgaatttgtttggtcgattggttgtgccatcgatttggttgccactttgagtggtagagcacgcattagactggtcgtttgcgacgtttgtttatgacaatgtactacctcgtgcagaatggttcagagttcagtgttctagtgttcctctcaagctgtctttgcagtttgtatcatcattgaatgtttattatgtgttcaagtcaactccccatctctctgcgctggcgggagaggagggagcgactcacgcgcgctcgccggtagaccagggagctcgcctagccatccgccgcccttctagctcgctggcgggagaggagggagctcggcatggctctagcgcggcgtaggcggcggg

SEQ ID NO: 51481 - DNA, 1905 bp, Oryza sativa
ctgcttgtgccgagacggtagaaagaggaagaaagagtagggaaggaaggagataacatggtggctgccagcgactggagcggtcggagtcgccgacgcgaccccccggcaggacccaatcccaccgactgacggagacagccggcgcagctgtaggcaggccatgcgccgccccggacgccgacctgccgcgagcgccagccaccgccggccaccccgcgggccgccaccaccacgctgccccgcgccgcaacaacctccgccgcctaatcgcctccacatcgtgcctcccgacgtcgccgtcgtaggtccggtgacggcggggccagatctgccgccgcccagcctgggagaccccgtcgtcgccgacgaacaccgccccccccccccccccccgcccgcgcgcagaggagaggcgtcaccgcgagaaggtcccaccgcaaccgtcctagctcgtcagccagttttgccggcggcaaggtgaggtagagggggagaaggaaggcggcggtggcggctagtgtttcgccccccgtgtcacctgcgcgggggcgacgagcttcctccgaaaatttcagtatatatcctatttgcatatatagatatatatgtatatatatgtatatatatatatatatatatgtatatatatgtatatatatatatatatatatatatatatgaaaatgaatctgtacacccaggtgtttgtactcccgctctaatccaccgtccatcaaaggtaagcaccgatcattccatcccaccctcctaccaggtctttatattaaacccgtttgatccttttctttttgaaaagaaattctattaattctgaattatcccggccggttatgcatatatatatgtttgcataagaaaagaacggtttgttttttttcttgggccaccgtacgtttcacatcaaggcccatagaagagtccatctccaccttgaccagccactacacagtccacctctctcttccacttgaccgaggccgttcccaccctccaccgtaccgatctctccacctccccctcctccgtaccgatctctccacctccggaccgagtatcgagtgttttccctatatcatatatttgttgtatcggatttgagatgtttttataaaaactgaacctacatgatatgagcaatccttttttgaggtgatccaatattagttttgttctttgcatttgagtccctgtaatattcatatttacatttgagtccttgttcgaggttagtggttcagttcttgttgaaaaaaaaagtaaaaaaataaaaaagaaagaaaaggcagaaaggtgcaaagaaaaagaaagaaaaaaaaagccgcacctaaaaagaaaagaaaaaaaattgcagaaacgtgcttaaagaaaagccgcaccaagaaagaaaaaaaaccattcatcctttgagtatgttttcagagtgcagagttgtgcattgattcatatctagtccttagtgttgtcgggtgcttgcttgagcaagagttgagtctagactaggccaacacattgactagtactttgaactattattcaactttgcattttctgattagcacatttgcgttcctttgctactatatattgtgccttccaagctacacatatatacttctggtcagcaccgctttgatccttgcaatcgccacatcatgtccttcatggtgtcacgaaccaaccaccgattgtaccgtccttagcattgctggtaagatacttgtaagagcttggtaaggtgctccatttggctaagttgttgaggggcaccactacaccgcgtagcagattattagggataacctttattgtttgctgttgtttttgtgtttgcaatgacaggtatgagtggcgctcaaaatcagcgataccaacaaggtgcac

SEQ ID NO: 51482 - DNA, 2972 bp, Oryza sativa
tggttagggaaacaagctaaaacttgagctcggctcggctcgtttcctggcccgagccagctcaagctggcttgcaagccttcctgttgaaacacctctctatatatattttgtaattattaaaaaaagcaagaacaaatcattaacatgtaaaatttaaataagtttatatattcaagtctacaaaatcttaatgataaatttcaagtggataaataataacgccatataaagtgaaataatcgatataaacacacaatagtctaggctcgcgagccaaaaacaagcggctcgcaagctatatcggcttgactcatttcagcaacgagctgaaaaggaggcttgggcttggctcgtttggcttacgagccgaaccaagcctgagctgagctcacgagtccgagctttttatccaccatcagtcggagctggccttcctcacgcggctctaccacaagcaccttgtcgtcttcgttggctactgtgaggagaatgacaagcagctgctcatctacaagtacatgaagaacggtgtgctcaacatcacttccacgatggcagctcgatgacggcaacttagctccggcaacgcatatgttgatttggacaatgatttgggattgtcattcgggatttgggacaatgatttgggattgcgattcgcgatttggaacaatgcttcagaatttgtgaaactgttttggacctgaattttcaattctttattttttctccacaaacgttttcgatggcgggtctcttaacattgctgccagtgcggccatcttagcttcgctacgaaagaaaacccattttcgctggcggctgtcttagcatggccgattttccatggcggcaggctgtccgactgcacaaatgcattattttcactggcatttggtccccggcggcaccgtcggccgccagcgaaaacccaatttggcttttggcaaaaaatcattttcgtagtagtgcctctcatactcaaattcacatatggcccttaataggattaatcccaaatttgctaccagccgcatgcaactatgtaatcgtagtttgatatgcgttagctatctcctaattgcatttgctggtgcactcagcacaatatataattttcacggactagtttaaattccactgtaccggggtaatggttttggagaaacctgcacgaacaaaatacagacactatagatggacaataacccatgatatagagtctacacgcaagtctatatggttcagacgatatatcgtataatatacaatagtcatatatgttttacacttatgcagatagacttaacatgttcaataaaatattagagaactagcaatgctgggataacggatgaaaccagagtagtcatgggccagagggaggtggtagagcaaggtccacggtgataactagctgaggagagacggcgtgtcttcgtggcacgtcgtgtctaagaatagtggagaggggttttaattggggttaaaaccttagctatatggtcctccataaggccactaggttttagctcctgacataccaatagtgcatattggttctttggctagaccatggtttaaaccacaattttatggtcaacactcatttttgatgttgtccaattaccaggtcaacacggtataacccaatcattgaccgattagacggacaaacaggctaattgacggtttatgccctaaactggacgataacccatggtataatgtctagacacggtctagaccgtctatactatggtctagcgaacacttgatacttcctccatcctttataagaaaccaaattttatctatatatccaagggagtaacaaattaagtggtatatatatatatatatattgtgtgaacacgtcccatattgcattttttgtagcggcaataaaaaaaagtagttttaaacggtatatattgtgtgaacgtgtcccataataagtatatttttggcagcaacaataaactcttgttttcttgagctggatacacccacacgtacgtgtaaagagtttcccactttattatttgacatttagctattttctaattaaagcttttacagcctttctggagcaacctgttcactgctcacaccacagtaaatgctagccattttcagcaccactcttcattgtcaccaacgggcaccttctgtcttcaccacagtaaatatttgccattttctgctcagatatagatatatatgaacgtgcacctacctcgttttctcctggatctaccccaaccttactccaaatcctctcttcttgctccaaatcatctcccttctgtctctccttcccttcttggtttcctgcttctatagacctagctagggcagccatggaggggaaaccatcaggtcttccatcttctactggtggcaaaggcaagggtgtaccagtagtaggagctaacccgtggcattcagatgacggctgtgatggaagcaagagtagcagtgagagagagaactgtcaccgatgattatttcggaatatttgtgcatcctgttcatggtgatcaggaggtggattctcgtaaggctaatcgccatgaagcagatcattcagaaaccgatagcgagagaactggaagtgctggctttgggaagatcgcaaatagtgcaggcaattctcgccatttctcatatgtagattctgggttgagcccagaagaaaaaaagacagaaaagtgaaaggtttcaacctgaggttcgtgaattcctatcatatcctgattttttttgtgtgtccatgatctttttatagttcatcaaacaaaaggaattgcaatgcattagtaatgatgagcatatcaaacaaatggtgctttatctcagttattctcgcaatccagttcaatgtgatctcctgggaaaatttttttttactagaaatgatcatatcagctctggttcagccatagcggcaagcaaaacagaagtaa

SEQ ID NO: 51483 - DNA, 2143 bp, Oryza sativa
cgatcgatcgattggcactacgtgctgttagtactagcctagctagctcgatagctgcaggggcagcgtcacatatgcacgagatgagagacgcgcaagcgtacactccgtgcactgcccagtttccttcttttgatgcaccagggggtccagggccggatcgagctgcacacgcaccaattaacacgtacaggatgccacagcttttgtaccaaattacaatgtagtagcaaggctcaccagccgcggaatgggttaagctcccgtgcggtccccgacctgggcgcgtcgtcggctagagtagcgctgggtacgcgattgcatgggagtactcaactggtcgggtaattggggcatggatgcatgagctgtttcggttggttctgcggttggctgtgacctgtcacgttttgttgctttgcttggacacatccacagcccctgccacgcattaccccacgactatgcgactgatagaccactatagtgtttttactgtttttacagggcatgcagagacctcgtacgtccttggggttacttacgcatattacttttcgtgatactagtattcaaaaattgagaatggatacatctcaagaaaatgagaatgcatcaagcaatggcggagaccccaaatgaaaggggccaactacagagatgaaatcgatcgcttctagagaaaaaaaaaggaaaatgaatcaattacatcagataatcgttcttaagcatgaatgataatgtgtgcctgagagcacaaaacctctgtttccatgtttgattaatacatgatatataatatatgaccgtcatggacatgtgatttttttaatggaacatttaactatttaccatttttaagacgtggcgtgaataatttatcatttatagtttatgacaagtgggtccaggtaaactgttaaacatcacatctaacattggtaaatagttaaatatctttttaatgggtacgcaatgtttaaaattattttgagcaatgagaaaatattccatgatataacaacggaagaatatataaaagaaaatattttcatatcgctaaaagtatatcaaagcctcttatttatattcgtagtactaggatgagactcatcttataataagttgttaaattttatgccggagggagtgaatagtgataaatgtttcaaaaaaaatagtaatatagtcatataggacgcatcattaattgatgctatgcatgtcctaaaatgtcatctgtctaagatccaggcagtactccctccgtcccattttaaacgtagccatgacttttcgtgtccaaatttgatcatccatcattcgaactttttatgattagtaattttagtgttattagatgataaagtacttttatgcataacttatgttttttaatttttttttaaaaaaaattcaaacaagacgaacgatcaaaattagtttgcttggggtcagaccgccaagaatacatttccttatagttagctgccaagaaatctgaatatccctgactctttagacttagcggtatttacatggcggtcggccaacggaataattaaccttaatggttttcaggctatttttgaccgccaaggacattatattttcttgtagtgcacacgaaaacttatgtctgcgtttaaaatacgacggatggagtacttaactagctagcccctcctgcaaagtgcgaacttaatttatcttaacctgtgtatcaaggaggttccacagaatgacatgtaatcgatgcatgcatggaattaatggatattggacccctctatgtcttaaatatatatgaaaatgacgtggagcattgtagtccctaataatatgccctaaatagtactgtgactatgtaatgccgctaacgtactcagggacactgatactcttacactaatttgtctcaagtactgaaacccaacaccaacagtgcatgctaagcgcctaattaagcatctagccccatgcttggcgactggcagagcgttgaggagtgacttcaccagcttttgctgaccatccagagctagccatgacgatcacgaattcgctgatatatcgatctgccagccagtgtggatagatagatctgcatatatactagtcacgcatgctccttggcagggcg

SEQ ID NO: 51484 - DNA, 3723 bp, Oryza sativa
tccactactagctcgccatgcatgcagctcatctgtctcggcctagaaaccgggccggggcgcgcgccggtgaacctactacttgctggctgccgcagcgcccccgcccgcgcgcgcgcatatgcgtccgttcgcgtggcaccaaagcgcattgattccatcccttgtctcgcacaggccggagggggggccatccgcgccatgcgatgcatgcatgggcgcgcgcgtctgcctccccgcccgcccgctgcgacgtccctccaaaaaaaacggccggccgggcggcacggtgcgcaactgcacatgcccacgctgcatgcgcctgcgccgagagcgcgcagcccggccggcggcgcgtgtcagcgagggagggaggggtgatggtgggtgagcccggcctgcctgcctgcctgcatgcctcgcgcgcgcaagcgcaaaccgcacacacggcaggcaggcaacagagcgccttgttgttggccgccgggaacgagaagcccgtgaacgaccgagcgaggccgcgccctcctgcgcgcgcacagtgacgcccgccgtgccggccgggaggatctgtcgttgcgctgcccgcgcgccggcccgcgcgtttcggacgcttgtgcttgtccacacgttcgtcgctcacgaaaaacgtaccgatgcctagtccaagggctgatgttacttactactactactactacaactgatctcgaagtagccggttctggatacatgtagccgtggaccgtttgcaacgtcagatcgagtgcgtacagcgtagcgcgctatatacagtgtgtacagagtaaccgtgtatcgatccaaggacatgggtagcaggaggagcaatacagagaactgactgtaagatagagtttctttctcttcgcttctatacgcagtacaagtattagagcaagtttaatagtacatccaactacaagctccaatttatttatagctaatttaatagtcgatttgtacaatagttgcttactatactattaatacctggtcccacatgttatatacacatcacgtcttgtaatccgtgctgtagctggctacagatttgtagcccgctgatcttctctcctattttatcactttaaaatatgtttatagctggcttatagcctatacctgctcttatactgtactactattgtgttctaagattggaccatgtggtccaatttgtcaggggaatccatgtgacgagcaacgatctcgaaaaccgcgtcacagagcagtgatgggtacaaatctcgggcagcatagacacgaacaaacttgcgagtgtaggtgtgccatgcactcatgcaggcagccgtaaactttttgggacaggtcagtctcaccaaactttctacgagtactttgccagtttgcctggttgaaacgtcgggattttgtcaatttaaatgcatcgattcgtgtgaaatttaggggttgtttgttccctcccaaacattgccaaaccttcttgccaaacctagccaaatatatggcttataaattgatggacacaccttagacatggtttgactagaaaatggttgtatgacacgtgggcctttaaattagaaaactgtggcatgccacaagtttggaagtgaaacaaacatatgtcttaaaaagtgtggcaaagtttgttaaagtgagggagtgaaccaaactccctccgtctcacttacgagcaactatgagtttccgtggctaattttaatcgtttgttttattttaaaaattataattagtattttttattgttatgacatgatagaacatgaatattactttatatttgacttatgtttttaaattttttaaaaaactttttaaataagacggacgatcaaagttgagcacggaaaattatggctgcacttaaaataggatgaagggagtacaactatgtgtttaatatagtactactagtattccctctatcccataaaaattaatctagtactccctctatactcgtaaaggaagtcgtttaggataatgtttaagtcaaatcttatgaatataaattatgaatatctcttaagttgttgagtttaaaaatgtaaaaattatatgaatagatttgtcttgaaaaatactttcataaaagtatacatataccaattttcaataaataattttatagaaacaagaagtcaaaattgtgttttggagaccgtgccgctgtccaaaacgacctcctttacgagtacggagggagtactggatgtgacacattaatttggacatacctctatttagatccgttgtactagaatatgtcacacccaattctaagttcgttttttatgagacgaagggagtacttagagtgggtttagaattgtttttttcttatttttgtaagaaatgtactcgtaattgtgatgttagttttctaaaaaaactaatgggacctggttttcatatgatcctggtaaaactttataaaaagaactgctcatctcgtttggagtacaaaatcctaaaaatgcaagaaaataaaagcacaagattggaatgtcacggcatttcaaatcccatggaaaaaaatttgtaagaattattcaaagcatgtattccgatggctcatagaaaaaagagtaaattacacgcgaagatgtcatattatcatctagactcgtaaacttgaaaaattgcacattgagatccactatcttgttttaatgatccataagtggtccaaagtgtgtttgactatagccgaacgcctatgtggcgctccacatcttaacgtggtggtaattttgtaattaccccctattgctacaatagtcatcgaaatcccccaaaatattctaaatccctttgcattcccccccccccgccgcgtgcttccatgggagaggcctaagtatcacgaggatgatgtcggcagtcatcggcggtacgagatgattgaggtgttaatttgggttgtgcgacaaacgatgctcgataggcgacggacaacgcaccttcctcgtcgacacgacggttgcgatggacctcaactttaagggagaagattaatcggtgtccctaccgtcgttacctcatcgtttcctgccgcctccgaacagcatcctcatcattgcaaccctagtcgtcaggggaatgcaaagagacgaagggattcggggggatttcgatgactacattagcagtagggggtaagtacaaaattatagcctcgtcagatgcggaggaggctggatgcaaaatgctgcctacgtggagcgccatgtaggcagccaactctggtcaaacgcgctatggaccggctatgatttattaaaacaagattatggatcttaatgtgtaatttttcaagtttatagatctaagtgatatctttgtttaagtttaagaaccggtcatgtattttactctagaaaaaatatagaaattttgtgatataggttagttaccccatctgtctctaaaatacttagttcctagaatccaaatgcacattttgtaacgagagtaaattactctaatgcctctaattaatagaaaattagtttggtgagttggtagataacggggtattgaaggataaattttcttgattcgtgaaccaatattaagtaataaggtactacgtatgagttagatttattttgaacaaagtttaagctctataaatttattttttttagacgaaaggagtagattagagtgagggtaaagagagaaaaggatatt

SEQ ID NO: 51485 - DNA, 547 bp, Oryza sativa
attcctgcagcccccgggactaaagatcccagggatctttactcccggttgagaatatcaaccgggaataaagcgtacggaccagcccacgcacaagcgcatgcgtagcccctctctctctctatctcccatccttatctctttttcttctccttccttatctccatcctctccccttcctctctctcaccccctctcctcctcccctccccctcttcctcttgcagaggcagccgacggcggcgggatgggggacgggcgcgggctggcggcggccggccggcggtggcgggatggaggcggccgggcgcgggctggcggcggccaggcgcgggctggggctggcggcggccggccggcggtggcgggattgcggccgggcgcgggccagcgggatggaggacgggcggcggcggcccggcgtgggccggcgggatggaggccggtcgccggcggcctcgccctcccctcccccagatccggccggaggggaagcggcgagatgggtggctggccggcggcgggatgggaggccggcaggtgagtc

SEQ ID NO: 51486 - DNA, 2221 bp, Oryza sativa
ggcagggacgaagcaggcgtggaggactggagggtgctctcgtccaccgcatgcgtgggtcgcgcatgcatctcacttggcggcacgcttggacatgaagcaggacagcgaggctgaagtgttgcgcgccgtgtgtgctgctgcccttcgacctcgcggtggtggtgttgctgccgtcgattcattcccctaccgtgtagctcgttgtcgatgacgactacgggaactccagtttcttgctgaccacgatgaaaagcgacgagtgtggcgcggttgtccaacctcgcaggcggcatccacaagcaccgaggtaggcggaaacatcgcccctgccctcgccggtcgcggcggcggcggctgtgaatggaccgaattgagtagcatactcattgggcttgtaggctgataatggagattggagaacggactgaaacgatttctcccatcagatgtgctacgaacaatgatccagagttggacatcctttgacatagaagcctccacgtcagtggatcttgtacccttcgttacaaagtgaaacaaaaaaaatcctaactataaacttaaacatagctttatagttgatttattttgagatggattcgtagctagtggttgatttattttgagatagagtgtgtagtagtacaagattatgtattgtcttgctccatttaagcatttcataacctgacaagtgctctatggactagcatttcatttaatcaaaatcgggtatgggaactcgtatggtgcatttaagctgctatagtgttatgaactttagtactccctccgtttcgaaatgtttgacactgttgactttttagcacatgtttaaccgttcgtcttattccaaaacttttgtgaaatatgtaaaattatatgcctacataaaaatatatttaataatgaatcaaatgataggaaaagaattaataattacttaaattttttgaataagacgaacggtcaaacatgtgctaaaaagtcaacggcgtcaaacatttcgaaacggagggagtactatgatactacaagccctttatttcagagatgacaagttgttcatgttcctagcatttttctttgcagaaagtcaaaacaggaggtgtgcatggcatcatttcagcaatgacaagttgtatatatttttccaatcaacctactacgggatcacagatgacaggttgaacaaaaaatggaaccttaagattatcaactaaaatgttttatttctcgaactagcaagtgagaatgcataggaagaattaaatataatttcaataactaaaataaaggcacccaagtccaaagtcaaaaagaactcgaaacctcaatggtgggggtgcatacccacacatcccaccggcggaggtagaatcagttcctcacttctcaaacaagcaagatgggcacttgatttttcctgtcactacttatctcatgattatcttaggtggacttatctgcttttgtagatgagcttgtttcatgctcaagtatgttggtagcgtcatggaattccatatggagcgcatgaaattagtatgtacaagaactctattatcttattagagaccctttaaacatgacaataccactaattgatggtactccatgaatcatacaagcttacatacaacagtttgtttgatacatgaatggcttttacagcatatctaagaatccttttatattgatcaaatgggccaacaattaacgtaaatgataatctcatcctaatatatgccatagaaaatccagcaagtctgcataaagtactgcatgctttcctcaatttcattgaggaaatttattaatatatccaactaatataaaacttagtatcagtctccaacaaatacaaaaaagtatatctaaaggtgaagctaaatggaattataagtataccaagctaaatggagctcgccgataaatgaaaatgcttatcaactctataaatagttagaattagccagaataagaccggaagaacctcatggatggtaggcaagtcacttcttccaggactacatcacgaggcttcataaattgacagaacagaatcatctcatcatccagtagcagaaaactggatgtcagcatctcgggaggcctttctgagcttcaataccctgcgcctgaactttgcctgctcaaggccatccatcgaaggcacaatagtcatcatctctaacattggtgtgttcttgagcag

SEQ ID NO: 51487 - DNA, 704 bp, Oryza sativa
tccgattcaaatttgaatttgaattcaaatattttttatatatagtatttctatacatctaaagtttatacacctaaagttcatagacccaaagtttataagtcaaaagtttacatacccgattcaaatttgaatttgaattatatctgattcaaatttgaatttgaattcaaatatttttttatatatagtatttctatacatttaaagtttatacacctaaagtttatagacacaaagtttataagtcaaaagtttacatgcccgattcaaatttgaatttgaattcaaatattagtttatagacccaaagtttataagttaaaagtttacatacccgtttcagttttgaatttgaattcaaatatttattgtgtaataagaagagaagaggaggagggagcgacggagcgtatagggaaggggcgggcgggtgatcacccacctattagccttaccctgtcttatatgcccatgaggcatgcccaacgcaggccataccctcggttgctatgtgggccaaagccacaaaaacgatctcatccccccaatggaagcaataccttcagatatacccttttcaaattaaagctgcacaatagattaattgcacaggtgcttcatgctacacaacgcggtgccacagcctaaacctagcctcagagcggcgcctcgcgtgagggtgcgcggagcgatcagagggt

SEQ ID NO: 51488 - DNA, 719 bp, Oryza sativa
cctgcagcccacagggcggggtacacagtcgccgtcccatcggttattcaaccggtcagatgcgcagcacgccgcattaaatgcgacatggcgcggttgcatagaccgctttaaatgcagttaggtggcagttaggcgctcccacctaaccctgtacacgtgggctgatacatggaggggtcggggcagctcgaccccaagcgagggcggcctcctccctctagcttggaggggggcagccgccgcgccaccccaggctcaacccccctcggggggagccacgtgggtttgggggcggcccaaccccaagctgggagggggcagccgccgcaacaccccgggctcgacccccctcggggagagccacgtgagtttgagggcggcctcctccctctagttgggagggggcagccgccgcgccaccccgggcttgacccccctcggggggagccacgtgggtttgggggcggcccaaccccaagctgggaaggggcagtcgccgcaacccccgggctcgacccccctcggggagagccacgtgggtttgagggcggcctcctccctctagctgggagagggtagccaccgctccaccccgggcttgatcccccctcgcggggagccacgtgggtttgggggcgactcgaccccaagctgggagggggcagccgccacaacaccccgggctcgacccacctcggggagagccacgtgggttt

SEQ ID NO: 51489 - DNA, 2393 bp, Oryza sativa
actgtcccaggttttttttgaggaaaaaaacttttaaatgtaactatagcagtacaaacacgcccaccattattcttaataaacgcacactatacatctaacgagaccatatatgaattgaagtgatttgttctttaaaatttagaccagtacagaccggttttgcaataattacgtacactacaaattttgaaatgaatatgcttatatgcctcaattatttgtctctgtctggttcctgcgacccagtgctcattgtgtctccatagcttggacaaggacaacaatgggtactgtggcaaaagtagcatgagttaattaataggcaaaaagttaatcgcacgagttaagctaagccctgaattttgggcgatgcatgattgattgctctagggcttatggagctatggtcattgctcgcatcactgaagtactgcttcatgttactcatgtggcctccttgtctcctcgtcattccctgtactgttaatccatgtgacattggtgtatatctgttgttcctaccctgattctcgtccttcatctagctggaaatgttataccttaagaataacaaatcacaaagttggattgttaactttcggagactgtctgctagctgcctagctggaccagttcctcaataatttacatattcgggaagataaaaattccatgtgccaacatttctgtcttgttttcaaccttaagatgaacatttcaggtcttgaaacccatctagaaattgggaataaatttttgacagaactttacaaattcaaacaagaactttaggggcaatttcctttgcttcgttgctcacgttgaatatcttttgtcccttgttgcctaggaaggagcccattctacgatattaaacttctgcaaatgtctaaaaaataaaggaatcataaacttcaagctttaatatagtttaatctgaataattacatcaaatgtttcgttttccaacattggcctcttctctttgccagcgtgtatgccattctctgtagtgtgaattgatcaatcttcctcaaattcactacttcttccttgttctctgcagcttcaggttcttaggtgtagttttattttgcttgtttaggacttccttaaagaattgaatgggtaggaaacgctcattctcaaggttaaggctgtgttcgtttgtgtgagatagggtgagaaaacacctcgttttccgtgcgcacgcttcccaaattactaaacggtgtgttttttgtaaaaattttctataggaaagttgctttaaaaaatcatattaatccatttttgaaatttaaaatagtttatactcaattaatcatgcgctaatggctcacctcgttttgcgtatcttcccaatcttttcaatcccctatctctcaaattgtaacatcctgaaaattctcaataataaaaatcactaaaattttgaactttttaaaacttttgcatcatgctggttgttataactgctattgctttccaaaccgtaaatgattacaaagaaagtaaagaaaagaactacatttaagcaatagatataatttaagagagttattatttatgtttaaccctacaagtatttatgcacaaaagttccaaattgcattcgggggttgaaatttaatagattaaacccctccataaaataaactaacatataaataaattgagctaatgtgttactgcgttaataacggtctcattaggaaattatagaatctttaataaatcttaaatatcggacaatattaaattttgggaaaattcacatttggacacttaatatggtcacccaaatgcttaggagtaatacaaatttaatttataacttttcccaatttataaatcaaccaaagccctaaaagtaggaaaataggaatacttagaaaaatatataataaaaataaaaataagttcaatattaaatttgaatacaaatttcaatggaataacttaggattggtgtatttttacattgtgacaaaattagtggcaacaatatatttttcctaattgcaaagtaccctctaaattcaaaaatagttggctagcactgttcattagcccctaggtgttcgatttggtttctagccatcctagctctctttctccccactgttgcgccgccctagccggcctcgagccccgcccgcaccggcgccgtcgccgtcgcctcgctctgccaccgctgccgcgccgccgcatcatgtcgcgtcgccgtcgccgcgccgtctccaacccgccgtcggctgcgccgcgccgctcgtgtcaccgtcgccgtcacccgcgtcgcgccgagcctcgcaccagtcgcgtcgccgtcgccgtcgcatcagtgcctcgcgccccgtgcgccgctgccgcgccatcgcgtcaccgcg

SEQ ID NO: 51490 - DNA, 719 bp, Oryza sativa
tcatgtttgattttaaaatcttaatgacaataaaaaaaggagacagcgggcgagccataaagagtacaatggcaaaaccgctgacggtttggcgggacttataaaaagtaaaaaaaatgaactcgaacgataattatgttcgatttgtaaaatcccaatgacaataaagagaaaagacatttgacgggccgtagaggagtataatggtagtgtttgacaagacttccagaaattataaaaacgaaacccaacgagataataaactcaaaaaacaaatccaatttttaaaggtttcaatgaacgaaacccaatgagataataaactcaaaaaacagatccaatttttaaaggtttcaaggagaatgaatagaaatagtggtagaccgagcaagcaaataaagaagatatgacagaagtaaggggtagcagctggtgtgacttttaaaaactatatagttagaaatacggggatgatacggggataactatttaacaaatttaaagtaaaatcatactaaaaaaatatatgattttgtttaggtgctagccgtgcaagtgagcgggccacccagctagttcgatttatatgaatgaggtatagaaaaacctcttaaaaagtcctatgaattatgtgtacatactcatattccttcacttttattattcctatgagttaaaattctgatgccttcctccttggtgtgcagggctgcaggaat

SEQ ID NO: 51491 - DNA, 1486 bp, Oryza sativa
aaattagaatattttacaacaaatgtgattgttggtagttagatttctgagcgatccaaccaggacaagccgatcaaaattctgctataaagctgggcagctcatggcccataacctaccacctcgctacccatgatctttgaatctatttgatgacgacacctccaaattcagccgctcgccatgcatgcccaccactctgccataatgccatagcatgctcgtgcattcctctccttccaaacacacgagtgatttttttccttaataataaaaatagtttacatctccaacatgcacatagcatcccgctgctcatgtgatagtattaaatatcaagtatgaaaccaactagtgtgaaagggcatctagcctaggtattgtagtgacctaagtagcacctaaggtcatgagttcaaatcttcgtaagagtgaatttcatattggtttatttaagggctaagtttcttgtttgtggtcctgagtttaaatctctatagaaccaaatttcagatcggttatttgatggctaagtttcaattggatgtaaaagctgcgtaaaaaatactcttctctatataaaaaataaagccaactagtagacgtaaagataatcttcctagattagctaatttcttatcatttcaatatcgttaaattgaccaacataaaactctgtcttcaaataaaattattatttttgggaccgctcggatttatcttttcggttagctcctccatggcatctggcagcaggagatatacaggcacggctgggtcctcttccagacctgtcttgtgtagctacaactgatgaaaagatgatggcgtgtctccgggtcttcagcacaaagggggcagcttcgtcgatgattttgttttttgaaagaccttggtgtgattttctttctcaagccaatcataaattcataatggtactgaatatctaccagaactaatggccggtaagcatgaatggcatgtggttatgtacattgatcttctcgtgttatgatctaaggagagaaaaaaacgaaaatgatgaatattataaattatcttaggcctgttatcgaatggaggattctccattttaatgagaatcgaaccaattcctattaaaatcctgtaaaaatgttgggcaatttttataggactgtcacatgaagtagttcatttcccataaaaatcctcttaaattcccatgaaatgaattgcatatcctgatatccacccaactgtagcagctttatgtcactggtggagaagtgttttttagtcccggttcgtaacccccctacagtcccggttttcaaaccgggactaccaatccgggactaaagatcgctatctttagtcccgggtgaaaaaaccgggactaaagatcgatctttagtcccggattggtagtcccgggcgttgactaccgagacagtcggggggtgacgaaccgggactgactaacacttgtccaccagtgacatat

SEQ ID NO: 51492 - DNA, 1182 bp, Oryza sativa
aatagtatgataaaatttcgttaggccccgacgatgggggttggttgaagaaagtgaagggattatggttgaggggaattagagtgttaagtttttatgtatcaattttaaatgggctttttgggtcttcattattgcaataggctacttttatagaagtaactcacatccaggatctctccggatcaccaacgggttaattctaatccgcgctgccatcgccggaattttgcgggccctctccccgctcaaccgcggatgagaattcttccttggccccagtcccaatagagaaattaccacccctacatatacctacatatattaagttctttcatgaaaattatgggcatttccgagaatacagtgaatacccactgcttctgccactcaacgatgacctaagttggtaaaatccgatggtgacatcagcggcagagctagaaaatctgcatgtgtacggtgagctaacgggagctcaaatatttttctagaataacatagcaatttttaaaatttaataaggattatggagctaggcataggagaaggagataaggatttttccagggtttatattattgtcggtaaccacgcggttatcgtggttactggccttaccgcggggtacggtaatagaaaaaccgcggtaacctccttaaattcaaataaattttaaaaataatttgaatttttaataaattctgcacggtttcgtgcggtttttcacggttaccgcggttaccacggattgggtgcggttttttaatatatatatatatatatatatatatatatatatatatatatcagaatttattggatgcatgcattatatttattagggtgatttaaactaggagatgataataattgtttcttggtctttgggttaagggtagttgtgccttatattttggaatggagggagtaagagattttggatgaatgtgacatatcctaatactatgaatctgtacagagtattaataactattataaatttaaaaacattttttttatttttaaagaaaactttattcacgatattcatagtttagcagtttggtaagcgtgctcttaataaatgaataagaagcctagcaaaagagctctttagaacgcatcctaagaggtcttcttgttggaaccaaaccctcgcattttaagaggcattcaagg

SEQ ID NO: 51493 - DNA, 731 bp, Oryza sativa
tcctgcagcccttcgtactaaaatataacaacttcgtattcaaaatttgttccagaatatatataacaatttcttcacctacattctcttcttaacctatcacaatcttctatcattcaaattctataccaactttctcttctcaatcaatcacaactttcttccatttaattctaccatcttttttaatacctgtgtctgagcctaaaactctttatattttaagacggaggtagtatatatgaaaataactcctctctcggtaaaaaaagaactataaatatgaatctacatataggacagcgggagtatatgatggacggaaagaacggcggactgaagctacaagtgcagaaccacaaaaaggatggttaagcacttaagcttatctaatccttcttgctttggaagaactgcctgcttgcgttcagtatataaaaaatttaactctcctgtattaaaaaaaaaaagaacaggcagttctcctgacgatcttcactaaaaaaaagcaataaaagctgaaaagctgggcagattcttgcagaagattatagtactcgtatgatcttgtctgttggagtagtcgctacttgtactggcatgtgcacgcttccatgtttctactcctacaagtttaatactagtactaatatatataccatgtatctactctacgagttcagtactagtatatgtacaactcatcgtgacagtgtgagtagtaagcagtg

SEQ ID NO: 51494 - DNA, 697 bp, Oryza sativa
tcttttgaagatggagacgaagatagaacttaagtgtttcacgtaaagccaggtggtagtaacgtgtaattcattgagccttaattattacaaacttgagcaatggattagtcatatatcctaccacagcttttatatacaaagttttcgcacgaaacgctctcgtttagcatattgaaaagcgtgccccgagtattcatcatttcatccacccttttcatgagaatcagacgctttaagatagcgtttgatccgtccatggtaagataagtcaggttcgagagtgtaaattttatcccacaaagactgagttctaccatcctacctatcctcagttaggggtgtaaacgagccgagctgagcatggaataggtcgtgaaagcatggtgcaagggaagtacggctcggctcgtttatgggataagatggctcgcgagagtggccttgagtaaatctcaagcagatataagaggaatcgaactacagtataccacatagaatgtgtaataatgtgatgatttttatgtgataggtcatcagatcgcatagatatataatatgacaatagtaagtaatcatttttagcgaataaatagttaggaaaggagcaagattttagcatatggccctatagcagtgagtcaagcgagctcacgagcccaagctttttgtccacccctaccctcagcacgtaaaa

SEQ ID NO: 51495 - DNA, 510 bp, Oryza sativa
gtttgaaaggaacatgtcctaagggcaatcccaacctaaggcgttcataagtagagcctatggcgccatgtcaataagacgtcacaattaaaactatctctacagcccatcttgtttaaattagaccctggataactacgtcatggtacttatctaccaatcatcggtatgctttatctatattgaagacaatgttctctgccatagcaaaacttgataattctttcccactgcggaacttgatagagtctattgcttatgtgctgaagatgaagaggtgtcttgcatgacaccctaatggttcatgtattctctctctatcaatgaatatagtgccggataaactaaaagtgctacatggcaatgtagtagatgccattgacaccctcctagatggagggctggaactgccctctgaaatgttgctaacgatacattctagggtataacggaaggaggattctttgcgtgcacatatatgtatgatactgaaatggatagtagtgctca

SEQ ID NO: 51496 - DNA, 2117 bp, Oryza sativa
gcatttagccccttgccgcccttacagagagcggcaaggggctaaatgcaattttcgcagacggcggcagacggcgccgtcgagccgccgtctgccacgttagcttgccgccctccattagagcggcagggtctatttttgtaattttttgtgccaatagattatttctgtaaatattaaaagaaaaaaattaaaaatgaaataaattcgtctctgacctcactctgaacccttctccttttttttcaacggccaaacaagattgctttacgctatattgataaaagaagtttaagtacaaagtaaaaactgaaagaaaaaggaaaaactgtacattactgactgcaaactgcaaatatgcttgcacgtcagtccaccttattcctcatggcaataatctcgtaaagtattttgcgtcggtcaactctagcaacccaacttgtgattgattcttactctgaacccttaaccccctcaatgcagccatggccgctcgtagccgatcgatcgatcgaatccaaaatctcccaaattcagcagctaaaatcaggttcacgtcaccatgccgctgcaggagattccgcaccaaaggcaaagaaagaaacgttctttgctatccagcatatcatagcagcgtagccgtcgtcctcgtcgtccccatcgatccatgtcctacgcggttatcaggttatcatgacactgtttgaatcggagagctttgcattcgcaacgcaaacccagtcgccatcaccgaaacgaatgatcgaactagagagaggaagagagagaaagaggtaggtaaacagatggttggcacgggcagcgtgacgtgcaccggttttccccccgagattatattcggatttggtgttcgctttatcatcgagtacaactgaattgtcccatcttttcttactactagcttaagctgtttttaggcttcctttgattcgaacaaaaattatagaaattttaaagtattttatttctatagaattttttcatatatataaacatttgaatcaaatgaatgaatcctatgaaatttctacgtgaccttattacatgcaagtttacatgggaagttttctttgaatattttatctcttctcgaattcatgtgttttttctacagtctaattataatcctatgttttttatattcctttgctttttcgttcctacaatttaaagagtctcagttgaactgttcggtctgtaactcagtaccgagtcgggtctcatggtggatggcgctgtagaatcagtcgatcaagcgaggcgaggcgacggcgaccgaaaggaaaggcacaccgtggtcaatggatggatggacggatcgatctcggccgtcgccgtcgccgtcgcctgtcactcaccatagcttttccatccgacgcaatgcacgccgtttcgctgcgatcgatcgagcgatcgatggatgcatgccctgccggccgtctcgatcggttctgaaatatcaacttgcaaaggcgatcgatcgatgcagcttacctttagaattgtcaaaactgcatcagccgctgcacgcatggcttgccaatcgtcgtctgctattatctcctaatcctgacgagtggatgtgacgaagtgttaaaggtgcaccgccccccaagtgaatatctgatcagtttggctttggttaagaggacctaattccacgtcattttctcgtcccatttcggtaaacaacaatcaaatcaacacagcataaccgatttgttcttcgagatacctgccggtgggtacacgaaccttttcttaataaagataataatgggtacatgaacctactcccggctttaattaatttgcagaatacaaacctaccttctcgagccagcctgccctagtgagaaaccaaccctttcaagactttacacgcagcaagatgttactgcaaatctgcaatcctaacttcagaatcaccaacttgtttctgaactgtagcatatcatagatattcatcaatcaccattcattcatagtactacctagtgtactactatcacacagtgccatgctactccggtactagcttcaaaaaggagtggacaagaattcgcacttagcagcaacagtagtggccagtggat

SEQ ID NO: 51497 - DNA, 5503 bp, Oryza sativa
tggtgcccggaggaagaaagaaaaggaacaggacgaatgcacattgaccatcacaattcacactactgtgatgggagaaaatgacatggagtagcagcagcagtagttcatgtagtatcatagcatagcaatatcatagcaatggcttgtttctttcttctctcggcatggagccatcaagatttgcatctgtttcggcaggtttggtaaaactgggagtgattaaagttgtggatgttaatgtgtggtgctagtagtagtaattagtttaggctccagttttatcaaagtgtaacgacttgcctcatgtagagtgcctacaaatttagatgttgtgttttatgcgagggaggtaagcttaaacacaggaatattgtgtgcagtaactaaatcttggaatatcaggtgcatggctataagcaaattttggggatgaaataaccatgccaatttcaaggggaatactagaatagtaataatgcttttaactatcggtgtacttttcttaaaataatactgatgcttagcgcgcgaatgacctcctagaggtgaaagaattttgtgggaattgacccatgtaaaaattcatgagttccaaagaaacatattttatttaaatactatatgaaattcagaagcaaataatttacatactactagattctaaagaagatagcccaggttaagggattaaataccttaaacatcagcttagcagtttatttaaggcaattaatcctactaatctttaagcctaaacctagagagctcgtatccatccaataggtccagatcagcctacttaagtagggaccatctttgatacgtgagtctcctctttttcacttgcttaggttgtgtttagttttttttttaaagtttttaaatatatggacacatatttgaagtattaaacgtatattaataacaaaacaaattacaaattacgcctgtaaactgtgagatgaatttattaagcctaaataattcgtcgttagcaaatgtttactatagcatcacattatcaaatcattgtgtaattaggctcaaaagactcgtgtcgtaatttacatgcaaactgtacaattgttttttttttctacagtttaatatcctatacatgtgtccaaacatttgatgtggcattcttagctaaattatttttatctaaacaaggccttactccgtattctctctaactacagtgccaacctctaccgcctggaccctggaggcctagagcttgtgattgtaatctagggctgtgtttagttcacacaaaaattagaaatttggttgaaattggaacgatatgacagaaaagttaaaagtttatgtgtgtagaaaagttttgttgtgatgaaaaagttggaagtttgaaaaaaaaacttggaaactaaacacggtgctacttaacgaaccaagtgtctgtcctcgcattgaattctacatctttgatctgcataatgcagtaatgtcctcgcatcggaccttgtcatggcaatccgcatcgcaaaatatcactacgtctgcagtatgctcttgcaactttacaagcctattccgcgcacacacaattgttcctcgttgcctcaaaccatgtgtgtttgatttctcaagcaagtcctttgttataatccgtcatatatattttttgcgagggttataatccgtcattgtaaccttgaacattgctttatacgatatatcatacttcctcaatttcacaatgtaagactttctagcattattcacattcatttagatgctaatgaatctaaacatatgtatcatggtggtgtttgaatttcctgaggatgaagataaagattaagtgtttcacgtaaaacgaggtggtaataacgtgtgactaattgggttttaaatattataaacttgaaaaatatattaatttgatattttagaacaactttcatatagaaagtttttgcacgatacacaccgtttagcagtttgaaaagtatgtcactagtatccaaattttcatccacttcttacattagaaacgaacggggttatgtgtttagattcattaacatatagatgtatatgggcaacggagggagcaatgactcctcacgactactatgaacgatgttatctggagggtgccaacagttgccaagcctcctcaataggagttgcgacgatcaattcgtcggaacttagtacccctctcatgcaacgagtaccttatcattaaggtggtacttatactcaacgagcatcaatggtagtgtttcgacacggtagcgacgtagatttgacatcaaaatcaaatacggtgattatctccctccaaggataaaaccacctttcatggagccagagaagaagctaagggtctatttagttctcgaacaaaaatttttaacgtgtcacattaaatatatggacacacattttaaatattaaatatagactaataataaaacaaattacagattccacttggaaactgcgagacgaatttattaagcctgattaatccatcattagtaaatgtttaatgtagcaccacattatcaaatcataacgcaattaggtttaaaagatttgtctcataatttacacggaatatatataattagttttttttcatatttaataattaatgcatgtgtacagatattcgatttaataaggtgaatttttttaaaaaaaactaaacaggcctaagctgcaacttcgcaatgtctcataattgttttatctcagtctcattttaccgaattattccttgctcccaacacaagaaatacagtactaagtacccacataggctaattagagtagagcctactgcttgcaaagtttgaaggctggtccggcttttcaacagggacgtgtcacacacccgagcagtcaattgctttcattgcttaaccgcccacactattgcagagattcacaaagcatggccgctcctgctgcctcacccccacatgcaacgcctcactgtacaaccgcgccgccgaggcaccgaccgacagccgggccccgcgccacgaacgcttcgctacgcaacaagccgagcaaagccaagcgcggcgcgacgcgacccaactggacttctcgtgcgctcgctttcctctgcctccccccaccccccgacgtgtccacctgccaaccaaagtttcccccgttcggcgaggcggtgagtgcaaagtttcggcgtcgtcgtcgtcgtcgtcgaaagggctcgcgcgcacaacggctccacaccaacaagggcagtcaaacttgcgtggtagcgtagtcatcccagtcggtggtttgttgtcctcctcattaatcttccggttgatctgtgcggcgtgcaactcgttgtgtttgttcttgaggtctttctgagtggaacatctcttggttcttgttgttgatggtgcaatatagaaacggtaatgctgcacgatcctgcttcattaccgccgcgaatcctgataagagagacagtgagtaagagcaggtacaatagcagattattaaccagattattaaccagctataaatatattttaatgatataaagatgaaagagaaaagcagcggactacaaatctgtagccagctgcagcacggactccaagagacagtgtgtgtatgacagatgggaccatatattaatagtatagtaagcaactattgtatgaattggctattagattggctacagatgaattggagctagtagagcaaggataatagtagagctcacttcatactattagcccatcttaaagccaacatatataatggattagctataaggttggctacaactttctttttctctctctatctctcacatatgcatttaatgtatttaactaggagcttgtgttaaactagttcttgcatgaaagccaatatgcttgattttttgttatctctaactcattattatacttactcatagtaggctatactattaaacttgctctaaaattcaatactctcgattcctcggcgatcgcgccaaaaacgcgacagccaaagcccaaaggaaaagaagacacaccgtgttgatgacagtacactgtagcagtgtagcatcagatatctacacatggctcaaataatcatgcaacgcatgggatggtaaaactggagaagtggatatcacttcgcacagatacgaagacacaccgtgtcgatgacagtacactgtagcagtgtagcatcagatgtctacacatggctcaaataatcatgcaacgcatgggatagtaaaactggagaagtggatatcacttcgcaaagatactaggaccagccgtattttacctcggaactcatgaaaactcgtcggcacccggacgcagtcgcctatttgctcacgaggcctcaacttcagagggtttcgtggtttcgtctgtaccgcacggtgtatggtatccgaagtgctcggtcgcatatattctgcacgaacattcagatttcccagttagtaggaagcatgaatagaaaaacgttagacggaaggatgcaggaatggggcaaaacagaggaacataagacacataaagatcagttcaaaacacaggaaagaaatattggattagaaatcaggtccatttgtacatttgcttcgtatggaaaaagctttccatgagatctgagctcatttttatttgcctctcagatcaaacattaggaagcaatccattgttccaaacaatggatatgcaaaatagattcaatccaatccaaacgaggccttatcccaggcctagattacaggtcacgtcctagtccctccataagttttcagccaagttccattctttttttcttttgtgcaaatctgtctctggttagtctctcctaacaaaattcaaacgagatgccccttcagaagaaaaaaaatctaaatcgagataaccttagtaagagacaaaacatactagatgatatgagtatatgacttgtcttttcggttccagtttaaaaactgttaatcatctcctgtttgagtgcagtatagtgaagcagctctatagtgatctttctggtattgtaaatgtggtagtaggctagtagcagaaaacatttatttctttgcaagctaatgatggattagtgattctaggaaatggatgaagaacaatggcatgaagaggagcagtttaagtctgagctgaaatgtcgagccactaaattttcctggcactcacaaacaagcaagttgcaaagtctacccattgtcctccctagagaggttgtaattgggaatataagttgttgaacggtgcattactggaatgtaaaacgtgaaaaattccttggcaaagaatgatgttgcttcttttcatgtgaaactggagtaggggtttcctcccctggttccaaaaagagataatcccttatataccactgaaaattggtctgattccttatataccattgaaaattggctcttcccttatatgccattggtctaaatttgcgcaccctctcatgccactcccatcagttgact

SEQ ID NO: 51498 - DNA, 949 bp, Oryza sativa
acacagtcaactgacggtaatggcatgagagggtgcgcaaatttgaactaatggcatataggggaagagccaatttttagtggcatataaaggatcaaaccaattttcaatggcatataaggaattctctcttcaaaaaaagagagggccggttctgtttgtcacctataggtaccagccagtaaatgcttggtttgaaacttcacgttatgaaataaagtgaacctattgagtttgaaatgtgtcatccacagcaaagtgtgatgcatggcaaatttctttggccagtcctttggtatgttttccaatttacaatctctataaccatgcgtgggttttactagattagcatcttctactgcagggactagacacaactagcaacaattttttatatgctgcggtgtgcaaactaaatacactaaaattcggtggtggataactgtggataccagtcaaattaccaaacttagtatcacctttctgtcaggagcatactgcggcttactagtatttttaccatactactacacgaccagaaatgcagatgtgctgtgtctgcataaaataattacacacattcctcttttatctccaatgaacttgatgggtatggctataaatgaatcaaatgattctacctgtgacaagctgtcagtcacatgtcccccgagaagttgagctcacgaattgtaggaaacatgtacatggagccaagataggtgtgtgaaattgcatgcttgacgcaaagaaattgagtgttacgcttttctattccggctcgaagcatatgcatagcttctatgttactccctccatttcgaaatgtttgacaccgttgactttttagcacatgtttgaccgttcgtcttattcaaaaaattttatgaaatatgtaaaattatatgcctacataaaaatatatttaacaatgaatcaaatgatagga

SEQ ID NO: 51499 - DNA, 741 bp, Oryza sativa
ctgcagccctgcatatttgctgtgtggcttgttgagtatgtcatatgctcaatcttgcaatattcattcatcagaggagtacttcggtgaaggtgatgatctggaggattaggctttgttcgggtcaagttgcttgtggagtggagtcgccatagctgttccatcttttgtttttatttccgctgcgtagaattttattcttttgagaggaactatccacctctgtaataattatttatttcgcgagtattaattagatgtttgatagtactctattatcaatttgttattgtgtgcctcggctgattcctagacgaggatttaacgcacgtgtaagcatttggaattttggatagaaattccgggcgcgacaagttggtatcagagctaccttgaccttacgataagccaaatggtaaaccttaagtagccttcaaaatattttgaaaaataggactgctcttctctattctcttacaaattaattaagttggcagcacatgcaaggttatgtaccaaatttactaaatcctactttaccaaaacagaaacatgttcttttatttaaaaaaaaactttactgttcagggtattaaatagtttaattttctgaatttcattggttagtcggcactgtacatctattatggtatcgattcaatcaagatagcaccagcactactcatccctgttaatggtgacactataccgtgcttatggtagatcctaagtattttagtt

SEQ ID NO: 51500 - DNA, 642 bp, Oryza sativa
tttcacatgcgggcctcctaatctaaccgcataggaaaatagcacttccctcccatcctattcaaaaaaaatggacttttcttctctctccccccgcccacctctctcctctctccctcccccttatcttctcagtttcctcttctctcattttcctctctctctctcaccttctcctcctctcctccgggcggctctcggcggaggggtcgacggtggctagcgggcgcagagggctcgcggcgggctcacggcagcggcgggcggacgtggggaggcggctgggagcagcgtgcgcgcggccgacgacgacgacaatggcgaggtagcggccgggagcagcgtgcacacggccgacgacgatgacgacgacggcgaggcggcggctcggagcagcgtgcacgcggccgacgacgacgacgaggtggtggcctgaattggcgtgcgcgcgacgacaccggcggcaaggcggcggccgggagcgggccgacgacgtgtgccgggagcgggaggaggcggtggccggcagggctgggagcagcgccgccctccccgcgcccagatccggtggcggcgactgcccccgcccggatctggcggcggcggcagtcccccgcccggatccggcggcggtggtggccg

SEQ ID NO: 51501 - DNA, 1304 bp, Oryza sativa
  unsure (1)..(1304): unsure at all n locations
tcggttatgggcaagctgagcaatgtacccaagtcagtgttttaattcttaaaatttgctcaacaattaaaatgtggaatggttggcctgggttggcttgggacgagctgggacccagggtcgggttgccagttcggtctgaatcatcgtaggccttgggttaaggcaggttcgtgagggttcacggccttgtttaataacattgtgtagctctaggatcgtccttataaatggctttgggcaactaagtgacttttaaatgctgtttactgcaaaacttaaccccaatattattatccccttgtacccccttgcattaatcatgcatccgccggtgtggcttgctgagtactgtggttgtactcattcttgctcaatctttcccctcttcagtaagagaagctttggagaagatgtcttaggtggagtcctggcttataccccagttgagcgcctgtgaagatggagccgtaggcccgctagtccgctgctgtttatttttgattgccaggcctgaagcgcctttgtaataatgtaaatattatcgatataataaagatgtgtcttttatatcatgtttgtgtggtgtaccccggcttttcctgggacggggattaatacactagcgttcgggaaaaggcaattttctcggtcgcgacactccgcgactgcccaacacatgagcctcgtcccgacacatgagacgcgtcacggcaaagcttttcgataacctcgcattggcagtacccgctccatgaacatanatcctcatgaactctaggcgtccatgtttctagcagtgagaggagttctggcgctcccgggaaagagaaatctcacatacatattatattagggttcaagttaagttctctctcacacacactcatggcagtcctaccaatggcgacaccgatgtagggctcgcctctcggccctacctcaacggctgttccaccgtagcgcacctgcctcactctggggtgaaccatctatgcagggatactgcctccgctcggctatctagtccgctaggtctatacccatacgagaagtgtggttgtacgggggtcgtttcatgcttaacttcatggctcagtccttaattgaccggggacggtactagccttttccagataccacccaaatcctccgtccgccccagtcgaaaacagttgttcccactttattttcctttcacaaatcatgtcatcaatttcatggcaatgtggcgctcatgtcttcacatgccgcatctcaattaccttcccaaaggtaattgcccaagcatttagcatttgata

SEQ ID NO: 51502 - DNA, 629 bp, Oryza sativa
ggctgaggaaagagcccaggtgggaggataagacaacggagttgctatgtccgacaatggcaccaagccgtcgactttgttccattcctcgtgctacttccactcgtcgcacttctcataccccgagctccgggacatgaaggcagcggggagcaatggcatgtcaccatcgccatccggtcggtcaagatgtcggagcttcgccgctgctccagctctccctgcaaaaggcgaaaggggagagaaatagaaagagagagaagggagagagagagggaggaggaagaagggaaggagaaagagaggatgacgtgtgggtcccacaatatttcttttgtgaatgacaaatgggtctcacatattttttttaattctaatactccattcgttcaaaaatataacaatttttagcattcaaagtttgtccaaaagtatataactttttcacctacattcattctcaaccaatcataacctttcaccattcaaattcttcacatactttctcttctcaactaatcacaaccctcttccatttaatcaaacctacttttttaatgctcgtgcccaagcctaaaacttcttatattttaggacggaggtagtatcacataagcgtcacgtcaacg

SEQ ID NO: 51503 - DNA, 1399 bp, Oryza sativa
cggctacctcgtttgcaaaataaacaattggcaggagatactttgtttgcccccaaagaagacgacgatttcgttgtacgtataacaaattacaaatttaactagcatctgcttattattactatcctaactaactaattatgtttgtttcttatggcaatccaaggaggtgcgcattcactttatggatcgacaatgtcgatccaacatatgatggccaaaagataactgagtctgaaacacaagtagagtaccagcgagagaaggagcatcaaaaatgcaatacatgttgaacgacgcggaaggagtcggtagataagctcaagcttgatttgtcaggaccgacaaatttgtattttttatccatgctatcttgccattataatgtttcattattatggtgtgtgttgttgtatgcgtcacgaattataaattaatgtgattgtatcgttctgaattccaaagtttctttgacgccacgatacgttgtatccttataaatttataagtatctgcttatatttttataacttccactttcaattgtgtacatgattcaacatacgcgagaattatacgtaacttacaatttataggtaacaaaccccctcatcgtactttgttcgtttcaaaacgatactttacctaattttaagtgctaaaaaatcaggttcatgtaaaatacctatttcgtaaaattttaagtgcaaaatagttagatttatgtaatgaataatttgaaactattcctccttccatttctaaacgatgatttacgtagtttttaaagtcacaattaaatatttcgatataaaaacaccccttgttgggctagaaaccgccaaaacaacgtgccattcaattctaataatgtttttcttatttcacaattttaaagtgatgatttactaaattttctaaatgaacggagctaaatgcctgggggctgcccttaaagctggcggcccccaacacaatacataatcgccctccctaagggcggtaatggggccgcctgcaaaagggtctggaattttgcaggcggccccattaccgcccttagggagggcgattatgtattgtgttgggggccgccagctttaagggcagcccccaggcatttagctccgttcatttagaaaatttagtaaatcatcactttaaaattgtgaaataagaaaaacattattagaattgaatggcacgttgttttggcggtttctagcccaacaaggggtgtttttatatcgaaatatttaattgtgactttaaaaactacgtaaatcatcgtttagaaatggaaggaggaataggttcaaattattcattacataaatctaactattttgcccttaaaaattttacgaaataggttattttacatgaacctgaattttta

SEQ ID NO: 51504 - DNA, 2306 bp, Oryza sativa
tagtagatcggctggttgtggaatggctgtttggttatcccatgagagtttgttaatcagagtgatcgagttgaattgcgaaattcgcgttttaaatacccaagttctgttggaaatggcgtcgagtcgcccggtaagttggtgcggctgtggctataatgggcatagacgcacagtgtgcccacggattgatggtagcgaggcgcgaggcgcgaggcgtggtgaatttcatccctgttgcatggttgctggggctgctgactggaccatggtgtgttgctatctgctagtcactgcttgctaggcatggctatggcagcatccaagctgtggcttcacccgtgcctcctgccgccaagcagaaggtgcaaccactgctctggtcgagctggcagtctggctctgatgtggcatggtgagaccactcgccatgtacctgtgttgggcagggcctaagatgcaaagtgctgcaggtgttaggtctataggaagaaagcatatacggggtttttgagctagcacattaggtagtgcatgcattggcgtgctgttcataaagggactctactaccgttttagattttatttgggcttccttttcttctcaatggatgtccatgggcataagggtaatgctgtagcatgaatgcatgattaatgattaaattttattttgcagaattattaagatagatgggtacaccaggtttcagacttgtaatgtcctttttttttttctgaaagtcacatgggagttggtatttattttctcctatcatgctatatatgtatcaccagtaagaatttttatgatagcatagagagtgcatgtgatgtatggaatagttaatcatctcactatttagtagtatttgttaaacgagtggagccaaggtgacattgtgcacgaagtaaaaacagcttatagctgtcagacaaaacttagttgcttgctgcagtttcttatatttcccagcaaaggttgggactatgcaaagcagcgcgaaggtcctagtggttatgacacctcatacgttcggttatccacagtgattttatctaataatcagtatgtataggttttaaaagtgattccagatgtcctgtaagttataggggtgccactgtgccagtatgtctctaatattgttttaaacaggctagttcttcacactgtaggtaaggttgattacgggtgttttagtttatctcatgttcctattgtgggaagagaagctaacacatgttcatgttcttgagtaaatcctagtttaaacttgcacatgtgtttgtttttctttttttgattccatatttccatgcgttgagataaaggcatagagtaagggataatgtgagaacaattgtgggcccagccattactttgtttttggccttttgcgcaattggagcttatgctaatttcatgaatatattctagttcacttgcatggcaaatctataaagactgtacatcactacatccttatgttgtacaggtagttaggccttaagacaaactcatattgtactagaatcagatgtgcaaatgtcacttcatgatgcatgtttgttccaaatattatcccatcactggcaagatgccaggattcatgtagtgttatgtagcacgataactcccttctttttttttttgacaatgtgcacgattactatgagaattcacaaaccctaaattcacgattactaaccctaaattcttatttattgttcggcttcatatccatctttgttttactagatacacttttatgttatttataaaaacttggttcaattacatgagcagctgagcgccacttatgtcatgccaaaaataatgttcaaatctagagatgatgggtctcttcaaaaaaaaaatctagagatgatgggattattattttgtttaaattttatgaaagctctgtaggaaatcaatatttgtaattacttgcctgttatatacctactttaacaaaaagggaccttgtatgcggagttggggactgctttgatttgataaacacaccattattatctttctcattaaactgtacattaattataagtgccctagaggtaaattgtttgaactgtatttgtgtcttctttcacatctttacatgacattaataattttttttactgaatcattcattaattattatttactgaagtgccctagaggtaaattgtttgaactgtatttgtgtcttctttcaccatcttatcttgatgacatgtaatatgtaactaactgagtaatggctgcgttctggacaggctgcatcaccaccaaggag

SEQ ID NO: 51505 - DNA, 659 bp, Oryza sativa
atgtattaatactctgatttgggaagaaaagaagtatcaaaaccctcaaatatcttttctcagtaagtaaattagatctaggaaccctagttttaggtctttgcggcgtacacatatcgtatcgatctctttcgggttccatttctagttctctgaatattgagggcttgacaaaggtatcggagcaaagttcaatccttggctctcggattcgaaaggtgcaggttggtggcgatctgaggatctgccgctgtaaaatcccgacgctggaagaattcgatccggtggcgacggtgggtctcaatctttggagaagggttggcaggaggctgtaaagtccccggatccaaatccttgagacaggcggcggtagaccagttctgtgaggcgatacagggcgggagaaatcctgaactgccgtcacagatcggagagattccatgtatggtaagcaagactcgttctcacggttcactggtggatatggaggagatgaacgaggtgcgtactgagttggctgggatgaagaaagacttattagatctgaagaatcttaaatcagaagtgagggaggtcaagaagttgctacaagaactttgcaagcagaaagggggagaaactggaaatactgaggcaggaggaggagctacgggtggaat

SEQ ID NO: 51506 - DNA, 1056 bp, Oryza sativa
ttctctcaagatatatatcgcccaataaaaataaaaccttaaaaattggaagacaaaacataagaccataagtttcgacggggattcattatttttaaccaacagatatacttttacaaaagacttaagcagacatgtgttacttgttaaaagttatgaaaagaaaatgaccaatggatattataagaaaaaaaaatgggatcatcggttttcacctaaatcatttaggaaaaattagaaaaaaaaaccacccctccccttcgttctgccttgcatatatgcagaacacaaacactaccagtacaattccttgttggcgtcactctacctctcccagtttttctatagcaagaaataataaaaaaatattaaaatgtgcatgatttttaatctgcacatgtgatttctaatgtaagtattgttgtatttataattgaaccaacaatttaaagatccataacgcctatattttcaactagtataaagtaaatcagaaaatagaaaatctcaatacagtcaaaaattgaaatatttggagaaaatgtaataagtttgtaaaaagatatggttcttactttcactaaaattggaccaatcattgcacgttccattttcataacaatttttaattgcttagatgttaacgaccttagatttgtactaaatcatagcattatgagtttatccatatattattgcacaaatagttccttgaaaagttatatttattactatcaaattcaaaactttggattcctgttaacaaggtacttttgtttagaaaaggtagtataaatcgaatatcacaagaaagcaagggctacaatgtgtcgttattaatttatatgtaagtataacaactttcatcaatttcaaactagaaggagggctacttcatggtacaaataaaacatatttattaaaaataatagttctttaggatttgttaaaaaaaagcaactaaacattcgattaaacaagacaaaatgctttgacacgttttccaaacaaactaaatctaactcctttctaaataatgaagagatcatggataat

SEQ ID NO: 51507 - DNA, 525 bp, Oryza sativa
attcgatcagtgcacacagccatacacccggtacggcacagcttctagtgaaaccgcacctttaatcttgtcaccttatgcatgagcaccagtcgcgctctcgctagctcgctttagccgatcagcccggtcgccgtgcaccggtcgcggctgccattggcacgcaggagcagccgcgaagcagggctagcgcggccgacacgatcgaacaactcagaccccgcgaacactccatgcgacacgcgcggttgcggaacatatcatgacaagctcgcgttcgcgcgcctctcgatcgaacacgcatcattctactactacacgtccattccatccggccatgattccccttctcgccgcggccagccggcagggccctgctccacacgccggtgtcccagcggatcgcacggcttttggcccgagagaatgcaagggaagagaacgagagagggagtgagggacagagagacccccgaccggctggccggccggccggccaggaagacgagagccacggatcgagat

SEQ ID NO: 51508 - DNA, 1550 bp, Oryza sativa
aatttgaatgatatctgattcaaatttgaatttcaagtcaaatattttctatatatagtatttctatacatctaaagtttatagacctaaagtttatagatccaaagtttataagtcaaaagtttacacacccgattcaaatttgaatttgaattatatctgattcaaatttgaatttaaattatatctgattcaaatttgaatttgaattcaaatattttctatatatagtatttctatacatctaaagtttatacacctaaagtttataaacccaaagtttataagtcaaaagtttacatacccgattcaaatttgaatttgaattcaaatattttttatatatagtatttctatacataaatttttctaacttttgttttttaaaaaaatttgtgtggtgtactgtagtagaaagagaagaaagggaggagtatagaggaggcggggccaaccgatcgctgcgcgatcgcccattagcctcccccgctcgtgggggccaaaaccgaaattttgttccgaaattgcaatcactggtcccatctcccatgcttagaaaaaaaaaaaaaggttgttaatagacagagcaaggactaaacgagttattgatatgtcaggaagtaaatatatggccgtgagtcttgtgacatattttgcctgggaataaatgctgttgcgatgcctcctcttcattatgtttcaagattttgcatttcgattcaatgtcatacccttggttgaaaggaatgtgcactagtgtttcaacaattcagtttcaattgctcatgcgataattctttccctcacaatccacttatattaagaaacaaaacaatgacacaactactggcatgtcgtgatgatcatacacacagtacttcattatttctaacttgacttgactgctggagaacccgaatagccataatgttttcatgaaagaggtagcaagtaaatcgataatttgagatgtaggaggttcttgaatgatgaaagaggtagcaagataaatggtccgccattcatgcttgatgtgttgtgtgtggagtggatgttgcagaatgacagtgaggctggcctactacagctggattcattctgctaagtcgcagccgcctccggcctccgggctcgccgccgccctctcttcccgccgctgtgcttgcatcccgtgtcgaccaccgagcttgcatcttgccaccgccgggctcacctctcgcactggtcactgcattcgaccctcgcaccagccgcagcctcactcgcgtcgtcgttgtttttgcttggtaaggcgtggtgcgacccaccttggtcgcttgccctgctgatacggccggcaatagggcggctgcatcggggaaaatcatccggatgccaccatccggcatctaaggggaatattcttctccgggccgccgtatcccgaccctgcccaccaaccaaacacacatgaaaaacacaaggctggctctacaatttcaagggtcctagagcaaacttgatgctgtaggcccttaatatgtgttttctatttacatatttttaaacca

SEQ ID NO: 51509 - DNA, 1462 bp, Oryza sativa
cactgtgacatgcagatagccatgtcttattaaatggtggtagtttttagctgccacaacaaaattgtgtatagccaatggaaacaaaacttatgtgaaataaacaaaataagcagatattatattactaaatttctatccatgtagactaaaaagagaatatgttgttcttacatggtcccatcctcctcgttttgcaacaaagcatcatacctaatctagtgcgtggtgattctgaagattaccgttggctacaaatttgtattgtctaacaagatattattgtgacttagccatatacctcaaaatttagcgcttgtcaaaaccaaaatttgattctttagcttttaatttgtttacccggtatagttacattgcccatattgtagaaatactatcgtctggtggaagaccaaaagctatttgaattgtacaccaaataacatttagcaaaagggcgataaaaatagatgtgtggtactctttctttagaattacaaaatgcgacatttggatctatacgtctgtaactgtccttttggctaaattatctttggttaggattactccagtaacatttgaaacctttattttgagggaattttcacattccatatatagcggtccattatttgtcaatcctctatatatatagaatgagctttgaaccatccatactggtgtaaaagactatcaaaaagtgtcatattggtaattgagttctatttccatttttttatctacaagctcactatatctcttcgtaaagaatattttagaggtttataatttaaaacctccgtgactgttgcactttggttcgttacaatgcaatatatcatttgatattgatgttttttattttttcacacaatagcatgttataattaattagtagcatcacaacctatattcagactcttaaatggatattcacgatatacaaacctagtcggcactattgtaactcattttctataccctattatagaaccaaagtggtcacggttatagtgaatcagctacaccacctcctactgatattctaacaggtgccacctcctccttacatcatgatagttaggaccataccatccttaatctagagcatttattacatcctatggctttaggttcaaggtaaataagggcatgtatataagggacgcttgcacctttgataaacactaacaccatggccgcagatatatagtgagcaaaggagaacattatccggagttgcctttttacatagtaaaaagcctttttttttaatgaacgatggacatgaagattgatgggtcaaatttagtacctctatgatgatttttttgtatattcacaaccctagtgaggtctgctgctttgccaggacactcgtattttataccgtttaaatataacacggtttttgcacattatacatcattttgtgtaacttttcaaatcattataaaactgg

SEQ ID NO: 51510 - DNA, 565 bp, Oryza sativa
tcaatttaagttaaaatttcaaaactcctaccaccaatcttgtttttgcatgaacacatatcacataaagcaaagctttcatttagtgattgtttactttcacttaatctgttggtgaaaagctgttactgtcctgatatttatattaaccattatacactaacacctttttttcattttaaaggttcaagttgcaaagaatattacgaaggggaactaatctgcaggcacgcagtgatcaccggtcaatgaatctccagcatgcatgaaaaatttgatcaaataaactatttctttccacatatcaatgttttgcgatgtgatttgaatgtattgtatttttttccttacgccattggagtttttctgccaatctggcaactgttaatcttttatctgaaaataaatgttgtatgtgagataagcaacaccagattcatgttacagtgcttgtgattgtctactaataattattactcttctctttgtgtaattgtgattctcaacataaatttacagtgattgtgtctcctaatgcaaatattttacttatagagtggagtac

SEQ ID NO: 51511 - DNA, 746 bp, Oryza sativa
ccacaatatgagagggagaggtagaggtgggtgggtgggtgaaggtgagagtaccggtgtcggaggtcatgtgtgcagtggcacccgtatccatataccattcatttgtagccggttggggaagcgtcatggtgttgaaggagttggcgagagaggcttgatcccactgcgagggagcccccccaaaccagcccaccgactgctgaagagcgtggggcatggagggctgcgtctgtgcctgctgttgggccggctggcccagtccaccgaagccatgtgtgccaggaagaagtccataggactacggcccgtagactggctgtggagccaagccgaggggcggcccagctagagctgtaccagcaaagtgggccggcactggtcacggcccaaggacgccacggcccatggatcccggccacatatgtatagtgccggcccatggattgagtgggctaggccactgcgcaggttggcctgttgggggcttgacgctgccctgtccaggcgctgtggcgccgttgccgccgccttgcttcccgccgccatttccgccgcgacgacagcgattgtgggagttcccgccaccgttgccgccgccgccaccaccgccttggttcccggcgccgaaaccggaggtgtgtgcagaggtaggggcgccagtcttggggttggaggagcctgtgccgctcccggcggggaacgctgcagcccgagctccgggacgaggcgtctggctgagttcc

SEQ ID NO: 51512 - DNA, 3603 bp, Oryza sativa
tatgtattcatataatacatatgtccctcggcaaaaaaaaaaaataccatgtacaatgagttaggggcaaataggtctttttacagctctaacagatgcccaactaacagcttctggactgtgatggcacgcagtagacgttcgggaaaacacgatggcatattattcaacttgacaaagtcagtggtatattgtagctagaagtagtgaaaactcaatggcactgagtggattctctctttctttaaatataagtaaaacaacaatttaaataaactaaaactctaatataacttaagaattataatcatttatctttgtaattattgatcgttattattaattagttaaaaatcaagagacgaagaaattaagtgagagaggggaggaacagagttcacggggatatagtacgcgtgcataactgtaatattattttcatggataatactgttttagttgctattattttgttaacttaaaagtttgattaaaatctatcttttctttctcatcctttcctacagtatattaaatatagtagataccaaaattaagaacactacaaatctaataaatctaataatgttattttgacttattgtaacatcagaataggttcattttaattactttgaagttatataggatgataaaatatatatcattattttttgataattttgtaattgtttgaatggcacgccaaaatcagaaaatacgggcccaaagcaacatattcattaagaaatactcatgcttggttgtatgcatatacttgacggtcacatcatacatgcttggcgaaatttcagaagaaacatatcgtccttcatcagatataagtattcatgctcctttctgtttttgaatcttatagaccaagttgccggtactacatagtgaaaatcagttttctctaagttggtcacttttatttcagattcagctcatacacgtgttagtgcgtgcattgcctactattcagctttccatcagacaaccattcagtagatcatggtcaaacaattgctctgaccatctactctggcaaggtattctgtacataaagttcttcattagaaatctaaagatcatattgtaattaaacgatgatcatatattgtaatccaacaaaccaaaagtatattgttggaaaattaaccattcctgcttggtgcagtagaaactatagagcacactataaaactgtatttagaaaaattgttatctgttttatcatcatatattcccgcagcaacacgcagggtattattagtagtgctaacggggagccgcaaatggatagcacggagaacgtcacagattctgagactgttgatcacccttccttggtaaaccttatgttgaatgatccaggtgtgcggatttgaaatgatcaaaaatttgaggatgatcctgcgatttggaccagaggttcaccggtccaaaattttgggaccggtggatccttctatgtgtatccaggaactaaatttttaggactttcagaaattccgatatgaaagttatgaaatttctctcggcccaactcctaatgcctcccatgtctaagtgcgtgatgttcctggatacacatagcgatatgcaatttgcagtatatgtcatctgtgcagacaaatggattgcagtatagaagatcttactcttgattgtccttttctagatggtgaacactagatattcagtgtaacagctatcacatgagaagtgtatgcacatgtgtttttacgattcttaaacagttaatgtgagattacagacagagattagtcttggaaaagaaaatggttatatttttttcctcgtataattacagaccatgaataagtagtgttcgtcaagttgtgtgaaacagattttctaatatctatgtccggattatgtcaaaacggttggactaatacgggccaatgtatttcttttggtcaatttgaatagacatcaccgattaataaaaaaaaccagaaaaaagagggaaatcaaacagagcaagatcgagccagaggcctagctatggaaatacaaattgcctccaccgaatggccatgtctgtacttggactgaatgaaaactagccgtactcagcaatgtcatgtgtctactgaacaaagtggcgcagaagattttggccgtgtttagattcaaaattttttgttcaaacttccaacttttccgtcacatcaaatgtttagacacaggcatgaagcattaaatgtggatgaaaaaaccaattacacagtttgcatgtaaattgcaagccgaatcttttgagcctaattacgtcatgatttagcaatatgatgctacagtaaacatttgttaatgacgaattaattaggcttaatagattcgtctcgcagtttacaggcagaatctgtaatttgttttggtattagtctacgtttaatacttcaaatatgtgtctatatactttaaaaaatttttggcacacatattaaacacaagtacacaacctttattgttcaactatgttggaacagggagcagtgttgctaccttgacagagattatctgcgaaatgctggctcatcactgtcaacatttgggaggataggatggggcagggtggatggcttattatgattttgagcatatcccgtgaatttgacaggtcgtcaattcctacgagtacgcttagttgaaccgaaatttcggcgattttggcacctcctgttcgaaatttcagtccttgtcactgctctattccggatgcctgccatgtctaagttcctttgcaaagttgtgttgtatattatctgtgcacaaaatcgacctaagaagataagatgtatgagactcatcatgcttgcagctatttaaattcaagctggagtcgatgcctttctttagagggcctcagtatcctatgggcttggcactccgtggaataaatttaggcctcggtcggcaccaacagcttgtttggcaactgagggaaggggattggaaatttacacgaggaaattaatggtgagattaagatgagaatttgatttttcatctcagtctcttgtttggtagaggtggtgaaaattgatagggagtttagttggagattagatcattaatgaaaacggatggctgagatttgtttaggcgaagtaaaggaggaattccctcccaattacctgcccctacccaggtattgaaaaggagggagttcattcctcaattccccatcccatcccaccaaaattcccatttcccccaaccaaacaaaacagttaatagcctcatctctctaaactcctaatcctcctagaaactccctccaaccatacagaccgcaagggataattataaccaggtaaaacggtcaccggaggggattgggttgatcccctcccaccacccaatccctttcaccacgggattatcatttggtttgtttggacaggtaagggattggtgggattgatttatttggactaaggtttaaagatttcattacataaattttaaattgtcacgaacaaaattgcagaaaattcaaaacaccacccaaaaaaatcaaaaaattcaaaaaaaatcaaaacaaaaatacaaaaatgggaaaat

SEQ ID NO: 51513 - DNA, 749 bp, Oryza sativa
ttcgccttcatttctttgcggagccttgccagcctggttccttccctgattccccatattaaagttctggtttctgtttctgttaatgctaaaggaattcctctttgcatttgcagctttctcatatgtcttagcataccaatatgactctagtaagccctgtggtttttgcccacaaacatcatgtttaatgtcacttctgagtcccccaataaaacaactggtaatgtattgctcttgtaaataagggtgatctcttctcactaaatcaacatattcctcaaacttatcaatatactgctcaacagtcatcccatactgcttgacattctgaaataattccactgcctcatgaacattggctgctgaaaatctagtactaatcatggcacaccactgtggccatgagatgatctgccaaggtagccccactcccctgaaccacttagcagcccttccttggaaatgagctaaagacatattgacccattgatccatcggtgttccagtcagctcgaaaaatttctcacattgcttaagccaatcgataggatcatcaccattgaacagaggtatttccaacctagggcccttgagtactgcttcagcatagtgacctccatcaccctggtgtcccacatagaaatttctctgctcatcaaacatccttactctaggattcccttgattttgctcgtaaaacatctcatgtctatgctgaaattgtggtggcctatactaattaaact

SEQ ID NO: 51514 - DNA, 2564 bp, Oryza sativa
atttctgcacggcattgcgttttctatactccattgcgtgagttattagccctgtttggaagtaaatggagttggttatgacttatgtgccctgtgaacccatatgcttgtcctgggatggaccagacggtgagaatcagttagagcaaggtgaacatagagtaggggcagtgagctggctatatttttttgcgagatttttcttttttgcgagagctggctctaattttattcaactcatttacagatctgtatagtcaatgatagtagggcctttcccacccaaaaaactaaccaataagataacatgttccgtcacttatatattaagtcaattgtccttatgcaaccaatgtcgaactattcaatatatagcttgtgtataaaatatatagtaaacggtagaaattgcggcttttatctcatccaatctatatctcgacagtagccgataaaatcaaccaataattttgacacacacagttgctgccaggctcccactcaacttccatataagtatgttacgactgaagataaccccatcaaggccaccaggcgatccgtgagagtcagatggcccaatactcgcgtaactgggccggagtggggccaagtcatgtaccgggtatatatgtttataaatacccaggggtgagttaggaacacgatatgggatgacaaacttgcacacggaactatgtcccatatactccctccgtcgcaaaaaaaaaaaaaaagacaaatcctggttttcgtgtccaacgtttgaccgtccgtcttgtataaaaaaattatgaaaaaattaaaaagataaatcacgcataaagtattaatcaatgttttatcatctaacaacaataaaaatactaattataaaaaaatttcatataagacggacagtcaaacgttggcacggaaacctagggtttgccttttttttgggacggagggagtaattcaaatcctcttcctgctcctctgttcttctctgcctccttcctcctcttacctcaggtgttcggcggaattcccatgagagaccgtaacaaagtactggggctgatatcggacagggcaggctgttgattctgattttgaccctatccagaaacttttacaaggggctgtttcctacttgcgtacatgctgaaacaaaatgtttggaaaattcagaaattcctatcgaatatttcaaaccctgttcgctgcataattttggggtccctcccatttctgtgtttctaatttttcttgattctcatatctccattgcatttcaagttggtgtaagcaaacttttcttatgtttggaacttttaactcaagaacatgcccatttgtagaggccctgatatcctttaggcttggcatttataggtgacatatacttctgttctgaaatgggaccaaacaaattttgcattaattaagatattttgtctatatgtcaagaaataaatactaatggtcccatttcagaacaatttggaaggtaaaggctagaaatcaatttggtccggaagtaaatactaagagaaattttacagtcattgaaaaggtaccataaggtatcaaaaattgtgtaaaatttggtacctcatagtatttagatactaaaagatataaaatttacaatagaaaaattagtacctcatggtaacttctaaaggaccataaaattgctcatgatgtgctatagttgcatttaaaattcactatgtactaataattgctatacatggcatcttgacattttgatgtttagtgggatgatgtgtatgcttacatgttgagttttagatttttagtgggttctaactatatagatggtataagtgacctaattattaacggatatacttattaacattgtacaaattagttagaattgaataatttaccgggtcatttgacccggtaaaactgcataggtacgcccgtgatctctaatatgttgaaatacaatcatctttgttctaagaacattggcatgacgaccgttggctctgccctcgtgtctgtcgctcattgccacctgtctcgattaatatggttctggttaagtcaagctggcaaatgttagtgccagatttgttttaaaaaacgacagtacccgttactaccagttcataaaaaaaatggttatctcgattaaagataaacaaaaacaggatgcgatagcatcaccattcatttttccattactttttgtgttggttctaaataaacctacaatgttgaggcaggggcgaagctaggtagtactaggggttcctaggcacccggttccaaaagaaaaattagtgattaataccccttagtgaccatatgtgcaccccacgctagaaaatcagaccacacaagcacgaatggcccactataaccacgacaggagcccaatacagcccagcttgcattaccgtgaggactaattaatttcattcattggaacagtagctcctaattgtgagtgataggttttcaattacgtgataatagctctcgtgttttttttagatcaaatggaaggtttggaatgaaattatatgagagaatccattaca

SEQ ID NO: 51515 - DNA, 1930 bp, Oryza sativa
  unsure (1)..(1930): unsure at all n locations
tacttttcccaacccccagagttcgagtatgtgtcagatgaaggtttctccgaggagtaggcttcgtccgtgccgtcgaggatgcctgtggagtggtgttcccgctgcagttctagtcaaggcttagctcctgttgtctttctttctttccgctgcatttatgtaagacttttatgatgtttgtaagacgtggatctgaatgtcaacattgtcgtttgtgtaccccggctggtcctggacggggattttaatgcacattctgcttgaaattctattcgggaatttctgggcgtgacaatagatctcttgatgcttttgaaatttttggacaaaacctcccccccccctctttttggatgagcaagaagaagacctcaaatcgtgagctagtgtgggggggtatatataggctgcaggctaataggtgccagttcttgttaaaaaccggcagctatattaaaaaattgacacctatactttgcatcataaccagcacctataatcctccccgacctatatgatgcaaaccggcacctataggtgttatttgtgctggtttttgaagccttattggtgtcgttttactaaataaccggcaccttttatataggtgccggtttttttgcatggctgccacctattaaatttttggaccgctagcaggaggatttttaatgccggttttagacaaaaaccggcaccaatgtcccttccaactaaaaccgaccacaattaaccgttatatgtgccggttttttggtctaatggcaggaagcgccttataggtgctagtttttagctaaccggcacctttgtggccgatacctatgggtgtttttgtagtagtgtgtgatggtggtggtggacctcgacggcggaggaccgtcacggatgctggacgtgagagccgccgccgccgccatcgtcgtcgtcgtcatgcctgcgtactccagcccgtggcctgcgttttgttggaattaatgaatgggccttagcccactcgaagattaattctttggaaaatcacaaaaagcccacctcatgggatggcatgcatgtggagtttagtaccaccttgcttattctaggagagggggacctccttaaaagggaggatgccctcctagccacttgaagcatgtgtggtggcagagaagaggggaaacacgcgcgcgctcgctcgcctcgccgggccgggccgggccggcggcgcgcgtgcacgacgtacgcgtcgaatggtccgaaaaattggctcctcacccttgcgcagatgcagcctccttttgcagttttgttttgctgcaaattcggattcggttttgttttggaaacgttccgaaaaatccggtgcgtgcaaacggcgtggnagtccggataagttcgcgcgacttatccggtttggttacgtgcagtagagatcgtgcgggcgccctgatcaagcgacccttctctatataaaccaacctgccgtcttcacgcaacatacgcgaaatcaatctagggtttgcctcctactctgtactgcgccgtcgctcgtagactactccatccctctcgccggcgtgcaccggcgatcgggagagcaggtctccggaacctctgccttcgacgtcttgcaccgggagaaggcggcaataaggtttttgggaagcgcttcgcgcgacggctcgccttcctcttcgctcgcgtgtttcgtgccttcgtagacacctgcgaaaagtttcgaccaagcagccggtctttccgtcacctcggtacgtgttcaatatgttgcgcatatttgatctgttcatgttatactgtgtagtttacatgtgtagatctaatgatgcgttcatgctagttttcatctgtaatgtcatgatttatttatggaatagattaaatcattatatgtctataatttcaacaatccaaaaaccttattgta

SEQ ID NO: 51516 - DNA, 3233 bp, Oryza sativa
gtatttttgagacggatgtagtaccctttaactaggacatatatttggatcattcatgcatatttctggaagtgatcaaattttgagggcaatttttaccatccttaaagtaaatgttggaaggtaatatacattttatagtgtaaaatttgatgcgttcaaatactactacctcgatgtattaaaaatttttatgtaaaattttgataaataatgatactttcttaatgagcataaaatatcttatttcttgaactgaaataggagtgtttcgatcaggaaacagccccaacaatttgagtcttaatttcaccgttttgtacacaattaaagtaaattaagtaaaagaatcaacaaaatgttcatcacctttgacatctgtcatagaattgcaccggagaaagatgcaatgtttctgagagaaaaccgttgcattttccaggtgctctctctcatcattattgctaactttcaagtgtatttggtctctagaaagatgcaatgtatgtaaaaaattgaatattagggaaggacctattatcaaataattagaaggggtgaagcttataaacccagatcgttcggcccaccaccttgtggagctagctgaaaaaccctaggcgtttcttaagatgcaatgtatgtaagctactactacagtagcagcagctactatcatcatcatcatcatctcatcatatgcaaattaaaggtcatcattattaaatgtataattaattattttaaaagtgtgcatctgtttttcattacatgtcactgttaagatgtcgactagcgagtaccatgtaatgccagtccaaactaacctaatagttcacgacaaacatttttctcatagtttgactcccttgctgatcagctccatgattcaagccgaagcaactcccttatccatggaaatgtctatatctttgacatattatcattaatttccattcattgcatagctaagctaaagtcctaaattcctagctggaactctgaacagctataccaaagttttgtcgacgaacatcatcaatttccgacagaaatgatcggtgaagattaattacagtctcactgtctccgattgcatcacatccttgacagctgctggactgtcatctttaactacagattccttgagaatttcctcgtcgcagctgctggactgaagaatgaactgaatattagctttgcttctagaagtgatagtagtggttagcaatcgtattttctcagaatcagtcagcagctagaatcattaattgttagtcaatgaagagtatctttactttaaaaatgatgaaaagcgtcttgctcttacgtagctagctagccattctccatttattttagtactcagaaaaaataaaattaaccaagtgtttgaattgaggatagattcagttttttgactattggcccggtccatgcttacccatttgacatgttagtggtgccagttatgtactgcagcctctgatgctgatcgagtgataggctcatagcaaacatagttgacgaaaacacatgaatgaccatatgagttgtctaggacaaaatattctgacaattgactaatatattaccccaatttgtccaaaacagttttgacatagtacactcggagagttttattttccttgtgcatgaggtgcaagaacgaaaagttcctcgtatttcgtactcctacatgataatatatactccctccgttttaaaatgtttgacaccattgactttttagtatgtgtttgaccattcgtcttattcaaaaaatttaagtaattatttattctttttatatcatttgattcatcattaaatatattttcatatacacatatagttttacatatttcacaaatttttttgaataaggcgaatggttaaatatgtgctaaaaagttaatggtgtcaaatattttgaaacggatggagtatatcacagcaaaacatcctgtcatagatcgattctcaaggtctaaactctagcaagatgctaaaattctaatcaacacttagtcacaaatgcatgtcattaagggtgtgttcgtctttaccacctcttcccaacttttactcaatcattttccatgcgcacgcttctcaaactactaaatacatttcttttgcaaaaagtttctataggaaaattgctttaaaaattaatattaatcaacttttaactttatttcagctaatatttaattaattatacactaaattaatattaaacaattcgaatgatatttatagttcaaactccgaaattttgatcgagtggttgttgaaaacaactaatcttactgtgtttttccccattagctgagtagctttttcggcccctgcagttttaattagtattcctcccagccattgattttgaagacaatattgaaaacctcaaaaagtcttttagctagttctacaatttatgtgctttgtcttgcacatgtattgagaaaggctagacttccaatcaattattctctaaggctccatttggtgttgcattggatactattctctagacatctcgttgggtacaattgttttgaacttgttattgttatgatgcaaaggataataatattttgtctagccttaatttgtctgtggaacaatactacaaacaattattgtctttattttcccaacaacttaaaaatatgagcacgaggcaacataacaaccacaaactgagtgtaccccttttacttctcacctagaatatataaagttcaactttctaaaaattgaagttagcaagttaaaataatgtgactatctataaaaacaatatcgattggtacatttattttcaaaatattactagccacatcgtcgtgctttgtgcgactattgattatgtttaagaacttatgtatatagtttattagttcagcttagcttttaaaaaggttttgacataagttaatttatttatagaatatcgattggcctagtcaactattgtcttttttaagttatatatgtttataagaggaattggagcctcctgttttaattcttcattatctttggcccctctctatttgtatcagtgtctaagatgagacactagaaacatacagaaattctcatatgtttagccatttgtgtttttttattaatgcatgtatcttttgacctaatgatcattggttatctaaactcttgatccgacggtcaatatgtttttgtgatgtagcacatccttatgc

SEQ ID NO: 51517 - DNA, 676 bp, Oryza sativa
ataaattaaaaaaataacgcacgtctgacaaagtagttaacctgggtgaaaatgaagccttaaaaaataaattcttcataaagaagactggcgtcatgaatcaggaattattaattcctgtattgcctttcatttgcatcagctaattattaaaatatgatattgtccttgtctatgttacagcttcatggctagtcaaagaaattcccatagactcgtgatgaacgaactcaagagtcaaccaataattgggaaagcgatctcaacatcagttgaaaactggctcgtttcaacatcagttgcagatatatagcgcacatgattattcagtggaggatttcctagcagcttcgctaattagagaactattattcctgaattacctttcattagtactatgtcacttcttggattgaattcgccgcagttgaatgttcagagattacgtagcaaatactccacggatgatgagccgaagcaattgatctctcagctcgtctgacaaatcaaggtttgagatttattatctctgcttcttaatcattgatgtatacatagtttaaaatataccaatgtcaaaatgatattggaagttaactgaaatattcagacgtatgcgagtacaggtaagtccctttttttttttttatgttcgtgtctcctttgaagtttgaac

SEQ ID NO: 51518 - DNA, 973 bp, Oryza sativa
atataaagagctttccataatccacacgggttataaattatgaggcccgccagtatagacctcgaaaggggcaataacgaaattttctcttcccatatttacaatcaaaacaaaaaatcgactatttttaaaatcgaaacaattctcgtgagccaatgagggtgaaacgaaacaaagttggcgcataactcacgggaataatttgttctagcttggacattaacacatcaaccaacaggatgaataaaatcattagtagaaactagtcaagcttttttcctgcaataattttcaaaattccactcaattatacagttaccatgaccgtaacccagaaaacctagccgacagtttcgatgctcttcgtcgtgaaaggaaacattttagtagccaaattaaaaacaatcttgcaagcaattgatcagaatttcaacgaaggaaattgcatagtctagtatgttgttttgcctatctattgcgccagccggcgatcttcggttcagtcagtgtcattgcaattcgtctacgcgcatggtcaagatgttcacatcacagcagtcagaaaattatgttcaacaggggaattaatcaatttggcggcaaagtttgcaaactaatgataagatcaacgtcatgcttaattagttggagcacgtgcaaacgtgcacaattaattactttgggatcaaacctcacaacgacaggaaatgtctgtgtttgaaatgggggaaagaagcctccaaaattacagattgacatatgatttgtcatagttttacaagtttcgagtttaatgggactggctttaatttgaagggatttagaagactctgaaaggtgtgtgctttgaagctgacttttcccttccactccagtaaaatgtgatttgattacgttagtagttaaaataacactacgatagtgaagacaactttgacatatattattagtcagacattgttatggagtagta

SEQ ID NO: 51519 - DNA, 2289 bp, Oryza sativa
tctattagatcgaccctctcatggggtatatataggagtacataggagatagagacttggagtacaatacaagtaagagtagatttatctctaggattctatctttaggatatatcttatctctatatttgtatttgactcttatctctaactaacatatctatacttctaaccgttactagcgagcttcattatgtttgatacataaatcgaaaaatatggtaggatccatattaaatgctatatatgagagaagattgtgagatgtacaccaagtaattttcttgtggaggtgaggatgaaccttcgcaaatttttctaagctatccacaaagattggatatactcgcgggtaacacctagctggctagaaggagaacctccaagagtaacaagccggatgtccaaagcaggttgtcgatccacaaatgctcaactaaactttagctcacacactactatgaaaacgatttttgcagatgtggtccttttttctttctttgtgggtatgttttttgtaaccatagatctgcctgcaaaatggggacaggggcgagatggccgtccacttgcgtagatatatcttcccaagtggacgacataaggtgccgccttggaagataaatctttgcaagtggagctcctaaggcatccgcctaggataatagcctaggaagataaatctctgcaggcggagctcttaaggcgtccgtctgggataatagcaccttatgtcgtccgcctgggaagatatccctatatagctttgaactcaaaatcttcggttgcctaagagaaaaaatagaggattttcgtaccctgcaggcggacccgctatccacccgtaaaaaccatttctggcctcctataaatccactatccccctctctctctctccaagaagtttggctcaagaacctaagagaagaagaggtggaaaccctagaaccctaaaacacagttataccattgaaactttttcagaaaagtggaattatggagaaaaaaaaagactgatattactagctagcatatttataaattactctagaaaataaattaatcaaatcataaattgtgcacataataagcaatataatacaagactagatgtaccagaaatcaacacatccaaatcgaactatcacatcagattacgctagccattttgattaatatatctatccatcttatccataggaaggtttacattttgtatgtaatcttggaggctaattggccagattagatgtggggtattaggcttggtgcgcaagtgggttggtgctccccagcatggtgtcccctctgatggtggtagaaattagattaaaaaaaagcatcaccaatcaaaggcacaacacaacaaaaggaaacccacaaaaccctagcttatgcacttttgccaaacctggccctaacctttgttgcttttactccagctgtggcgcccttttagctagctagtatgcttgttacttgatagtactactctcttttttttttatcaaaaatactatactcaattttcagtttccattctgtaaagaaaagatatatgtatttggtgtcactagtggtgaaatataattatgacatagaactattaattggagattcatgtgagcattgtgtcacttgagctgtttgtactctttaattcctctaattagttacactaattggtttcatataccatagagtgttctcactactagtccaagtagtaattaagaagttgatcaaattggcaacacaatgatgaactttctcgggattggcctttccaaaaggagggctgaagaagggagcaaaggaagagactgaaaggaactatacaccattttttctgttgttgcctaatggcaattatttggtgttgctatctagcttctgatggagaagtccaaaccatggaactaggtttttgccgtctctcctcaagttagcaacataaattctgagagaatgctaacttagctgctaagacatactacttccatcgattgcgaaatccaattgacctataattggtgggtctaacctctatctgctagtctatatccatattatttggctcacactagctattttaattttgaacttactgaaaacacctttcacttaattatgtacacagacagtagaatcttttttctgccattacatctgctaatttgttgcgtccatttattagtactttgttaatttgagttgtcaaatttacacaaacgcacaatctttgtttcttttttgagcttataaggttgattggtagtgctaatatat

SEQ ID NO: 51520 - DNA, 2602 bp, Oryza sativa
ccatgcccggacttttctctcatttgctagagtccaatgtaattctttgtcagtataaaatagagttgatgcttaggcaattccattgtcgggattcctgactcgcacaaaccccgtgcattcttactatggccccattgtgctctgacttgttctctaatttgttaggcctcgaaataaatcttaggagagttaaggatgttactgccatcgacaatattgaccacagtagacaaatttactcctacaaataacatagtacaaaggagagttgagataatcatttaagttatagtttatatgttatttctcatgaaaggttgtcttttcgtgatatgatattagacatgctctctctactacaaaattacgcttttccgtatgaatttttattaattgttgtctccatcgacggccacgtgtagccttggaagtgtcctaatggacctttctagcactcccgttggtccatgtagaatagttttcataccacataagttaaaaatctaatgcgtgcaacttgagttaattattgacgatttccctactccatgattttgttagtatgcttatatactcccacgatatttttattcatttactatatatttataatttcagaatataaagatggagctttgttaatccaggtgagggggagggggaatgggatggtactttgtttttttatagtttttctttaaatatagatctaatgactgaaataatgattttattgaggtcggatgcttcattcttttagaatttatgtgatttttattaatttttaagatgtgatacgtagcggcttatgagagtagaatgatatatctaatggctgaaattaatacgtctgccgatttaagtgtaaaatgatagtaggatgttttgctttttatttctcatagaatttcaacgatatttcttaatttttaagatgtgaagggtgatggtttgtgtcctacatgatatttaatttaatgtgcatatgtatatatagaatgatttaagatgatatagttgttgtcaattttttttatattgtttaatgactgacatgctagggtctatgtccaaacgtatttcagttttttctttaccttcgcaaaatatatgcaataccgatcttgatgtatttatttaattacaaatgaaaatagtacaaatgaatcaaatgttgtatataaattgagaatcatggttatttagctatttaaaatttaaactattttgtaatgagttgttagaaaataggagaaaaggggagggcatatggaatacgtatcacatatttacgtacatacgtacgttggcatgtacggcaggggaagggaagggtacatattctgtgagatcgatctagtaggcccatatgttggattgagtatatattgctttaaaattgatctaatggttaaaactaatgggtccactgatttaagtgaaaatcaatggtgagatgctttttttaaaaaaatttctaggattttttctaatttatcagagcgccacatggcgatttaggagtgtttatagagcgccacatgacgacttaagagcgtttctaggaagtttaatgaacttttagtatataatatagtatataatagataatcgtacggtcatctggaattaatatatagtagctaagtgatactgggtactgatggcgtgcttgtatacaaccagttgtatattacttcctccgtcccaaaataattatcattatagatagtttaacatacattactataaaaataatttttctatatgagaacccctataaattgcgggcggaccgtaactagtcgtgtatgcaaaaatcgatctctattttcgcatacggctccttaagaggctcacatacaaaactatatatattttcgcagctgcataaaaaaataagcctattttcgtatgtggggtgcgaaaatattttctcttctccacagttttttctcctatcctttctctttgtcttctcacaacttcaattttttttcacctcctctcctctctctctgtctctctctctcctgatattttcctctcctctcccctatctcttcctctcctctccgagcgagagccggtgggcagcgggcagtggcgccaacaaggaggcagcagggagcaggcggcggtgggtggcgggaagctcagcgacctcgggccgcggtgccactatagaaggagaaatccttctcacttcataacacacactcaagaagcaatttctctattctatatttgtatactctctagtttagtagagtttaggcttagaatagttgttcggtttcctagttttctcatagattcgagcatgcatgcttttagtactttacttttgttgtaagactatgagctcaataataaaattatcttctttatttgattgtgtttgtagttcatatactgctctgtctattacatggcctataagtagtttatacctctttcgtatcactggtggaaaaaccatctttcctcccggttcgcaacctccctgtagtcccggttattcaaccgggattaaatatcgctatctttagtcccgggtgaaataaccgagactaaagattgatctttagtcccggtt

SEQ ID NO: 51521 - DNA, 630 bp, Oryza sativa
ctacttttgcttcgttcattttcctacggcatatcaaccgtccctcaaacgattagagccactgtgacatcaaactaatggagtaatggagtactattcttgggcaaatttgacaaagaaaaatattgaaagcatcagtacatgaaactaacaagcaagctctaaccaaaggggctttgcgccccctacaccataaatattttctttctcagcgtctcaatgtgcataatatatgattatcatatatatcaacctttgcaatgcaaagtcctaccgctaatgagtttgaaaactgtttaattttgttctatgagtatatgaaagctcttatattagatttatctagataaatgcttcacaataggaaaaatgtggatcttgctccctcgaactatttctccaaagcactaaactatataagtgttttcagctcacattaaccttcaaactacgtacttaaagaggctgactgtctatataaaaaattatcgtttcttctgcttatacaaaccatgatttaagttaatatttcgtggaaccatatatagaacagaataatatatattgcaaaatatttttatttatttttatgtcaatttgaatgcagttttaaatctgggctgcaggaat

SEQ ID NO: 51522 - DNA, 725 bp, Oryza sativa
acggttgctgctcctagttatatggaaaccctccaccaccactccagtcacctctcaaaataaatataaggtatttccaaagcaccattaagttcttctataatatattatcaacaaataagaatttaacatcttgtataattactttgtttgcatccgcttagctgctcaagctactcacatacacaacaatcaaggccccacattggctcaccttatttttctccaatacgttgaagttatggctccaatgtatataaacacaccaacttcaccatcaccatgcttctcacttcagcacttacacgaccactcaagctcaccatatataaacaattaaagggctcccgcattagctagtcttggtgagaatcaccgttgaagcacatatccttctcaatttgtttttttagtttataaagattagatctaatagttggaaataacgtgttgactgatttaagtgacaatcaagagccgtacgtttttatttttctcagaatttctagaattttttctaatttattagaatatcacgtggtggtttaggagcatttgtagtagtcttgagagcgtttgcagcaaattcaatggacttttagtatataatagatttatgaatgtataaatttggctgatttttacttggattttttattatattttaaacttatgatacttctctcaaaaatctatttgggattgctctgaaatttggttatgat

SEQ ID NO: 51523 - DNA, 2610 bp, Oryza sativa
  unsure (1)..(2610): unsure at all n locations
gggtgtccagcagctaattattatatttttgcagtgtccacagaangatacacgttctttgggtgtgacacagcaaaggtcaaaactttgagtgtcttgtagcaaatttttccatatttaaaatgaaataatctcacgggaattttgtaagaatcgaactaattgcgatgaaatggctgtgaaatttctatgttccaaaaacaccacgtgatctggtgggagcacaaaagcaaggccccgatatttgtgctagggtcgagctcgatcagctagctatatatgagggtttttgcagggaaccgacacatattgtcggttcccagttggcacctatgaggatttttcactagtgatctccttatttggtatggtatttgctagaacaaggtaaataatacaaggtaaataatttaaaacgaatggagagtaggacaggaggataagatctcgtgatatttcaggagatcgattaactatgatagagatcaaaccaaacatgagttaaaattagttcaaacttctctctgatatttgaaatgaagggatttcacgggaattttgtaagtgtcgaactaattcccatgaaatggctgtaaaattcatttctacgtacgttccaaaaacgccacgtgatctcgtgggaggagcgcaaaagcagggccccgatatttgtgctataggatcgagctcgatcagctagctgctgcaagcgtacgtacgtggatgagccccagcgcttgatcggtcgatcgatcgataatatcctgagtgttcttctgagattttgacgtgatcaagctagctagctagcctttagctgattcgctagaacactcactcaatagtcaatactactgcagtgtgcaggttacagataagagaatggacgagagctgcgtgctgcaccaacgatcgagaggcaagcagatggcacgcctgccggcggacgaggtgcgcacctgtcgaaatgccactagcactctctcagattccatgatgggaggggtgggacgggttgttccaaatttactatttcatcccagtatgttcaaaagataaaaatctcagttttgtatttagattgaagggtaaaaatttttatcgtgtcacatcggatatacggatatacatttgaaatattaaacgcagtataatattaagagtgtgtttagatcccaaaaaatttttggtcaaaaatatcacatcaaatgtttggatacatgcatggagcattaaatgtggacgaaaaaaaaccaattgcacagtttgcacgtaaattacgagacgaatcttttaagcctagttgagccatgatttaacaatatgatgctacggtaaacatttactaataacggattaattaggcttaataaattcatctcgcagtttataggcggaatctgtaatttgctttgttattagtctacgtttaatacttcaaatgtgtgtcagtgtacttcaaaaaaaattggccaaagaactaaacatgacctaaaacaaattacaggttccgcctgtaaactacgagatgatattattaagcctaattaaactatcattagtaaatgtttactgtattaccacattatcaaatcataaagaaattagccttaaaagatttatctcacaatatatacacaatctgtgtaattagttttttctatatttaatacttcatgcatgtgtccaaacattcgatgtgacagggtgaaaaacttgccagggaatctaaacaggccctcatataagctcgaagaaatacatatttaattataattatatatttacaacattaaaacattaaagattaattttaaccaataacataaagaataaatttttactacttatttttcctctcacatcctcataaagcaaaatttctattttatagaggccaagtgtttgttggtaaccgtagcaacggtgtttgtatcatctatttatttttttctctttttctgccaccaagtattcccaataggcaatgctaataataattgcacataccctaatcacttctgaaatttattgaatacaaagattaagaaagagatgaaattaaatgataaatggttgtgaacttgtgattgtggttgagataagaaagcatgggtgaagaaattaaataagagatggttataattagttgagacaaggaagtactccctccgtccaaaaacagctaatctaggagtggtgttcagattcgttgtagtaacaggagtaggtgtagaagttgctatattaatttcgaaacaaaattcagtttctatattttaggatcgagagttgaagaaagttttttttttatactagttctttgttcttacaattcatgggtgtgcatcagtgagatacccggggtgggtggctttgcagagtatgggatgcggcttatcgatcgtgcatggagaacgcaaaagtgaggataaaaaagaagctaagggagaaaacgcagtttgtttttgtagtgatatctggaaagtgagattagcatgtttctcttttgacatgcgatcccttttttgttgtctggtcgtactagataattaactaagctagatcacagtataagtctatcgataaactctctagttaaaagtgaat

SEQ ID NO: 51524 - DNA, 2036 bp, Oryza sativa
tctcctcttatcatccagaaaaaagagcaagtgcagaaaatctgttcttatgcatacaaaaagagcaagtgcagaaaatctgttcttatgcataaaaaaagaacaagtgtagaggtatataaccaatgaatcaagcagaataaatttaaaaaacagcagcagcaagggtacagaatttgcatgattgacataaaacagcagcaggagaagtataataaggaacacattgggcagcagcagcaagggtatataaatcatcaaagaatgacagaaaacaagtgtatatagtctcctcttatcaatccagaaaaaagagcaagtgcagaaaatctgttcttatgcataaaaaaagaacaagtgtagataatttgttcttattgagcaattcatcactggccatttaacaaggaacacattgggcagcagcaacaggggcaaagatactccacaggggcagcaacaataggggtgtattaacataaaacatcactggccatttatctagttaaaatcatgcaaaattcaaccaatgcagcaaaattaatcctaaaatcatctaatacaaaaagactaattcatctaatactgcatatatttcatccacaaatagtccaaattcatcacctcatatatttcacatctcaaatatgcatatatttcatcaaaaaaaatgagacagtactactaacttcatgtaaacagcaattcatccattcaattcaatcaagtgtagataataaaacagcccataatcatttatgtggcagcagcagcaagggtatataaatcatgtatataaacaacaattcatgcaattcacctattcatagacaaaaagggtatataaatcaacaagtttagataatctgcaaagttccttaatcatcaaagaatgacagaaaacaaaatgcatggagaattttggtgtctaggtcggttccgtccatggactacactgaccaatccaccaaaattccccatgcattttgtattctgtgatggtttgataacctcggaacaacattaaatctgcggccaatcaatcaattcttccatttgaactaaatttcaaaccctaaacctaataaagttccttaattatcaaagaatgacagaaaacaaaatgcatgaaaaattttggtgactaggtcggttccgtccatggactacactaaccaatccaccaaaactccccatgcattttgtattttccatttgaactaaatttcaaaccctgtatatgctttatttaatagttctagcaaaagggaacaaaacaacatataaagcagtacacactccatgaatggttagatatctcaaggtactttcttaaggaccataaaatttctctaaatttgatagacaacataaatgaattatggattcaggaggctagtgcttaagtaaatgtatacacatgttactccagtgctctcagatttatggtatccctccgagttaccagaaaaaagaacactccaaaataaaaaggatgcagaaaccagagtgatgcgcctatctaaaagaagtcctgatatcccaaccaaatactaaaagatatcatcaaggtgaaaaaagagagaaggtcatgcttgtacacagaaaactgaagatgtataactctatcggattggcagatcaccttaactcatagcttatcaaaacatgcaacaatctgaacggaatgacaaaattcatcgttcatccaaagttcatcattcatccaaagttcatcattcattcatccattccattgcatcatttattcatccatccactgcaccattccattcatgggcatcagagagagaggggtacctggagagggggtacgacgagtcccggcaggcgcacggcgcacggcttctcagcacggcggcgcggcggcacacggcgacaacgagtcccggcaggcgcacggcttctcagcacggcggcgcggcggcggcttcttggcacggcggcgctgaggaggagaagagggggttaatcggcgaccaatagtaaacgaggggaggcggggggagtgggct

SEQ ID NO: 51525 - DNA, 3317 bp, Oryza sativa
caatgatgtcggtcaatcccggcttcggcgccttgcctttaacggaacctgggcttgatggtggcggtggctgtttctcggccatgaggagggactgacgtctgacttttaatcaggtcccaccgggcgtgccaaaagcgtgttgacagaaaacatgtggcctgggagatctgcttaactccagtgtaggtccaaagctcaccttcggatatattagcgtaacagttgatttgatcctgtaatcaacaagaaatagaagcaaagaaaccttagttaaatctataaatgattgccgatcggctagatgccgatgacatatcatttatccttaggccgatgttatccatgtatcgatcggcagtcatgaataagtaaagaagaactaaatctactcgatcggctgtagatattaacaatatatactccttatatcgatgcatacttaaatcaagtgattgggaaagatcggtcatcatgccgagacagtataaatcacttagatcaaaatatatgtcaataaaaagattagatatgtttatagcatagccgattagatggatctagcatgtatcggctaatactccgatactactctatatcaagatattaaagcaagtataatatattgagcaaaagcctaacatacttagatacagcaatatcttaatataaagggcagatttaacatgtcaataaggcatatagaacaaatgaagttaaatcagatacgatcggctgaaactccgatactattctaatcggcaactagaaggcaggctagagatcgatattctaagcacgacttaatagatcaaactcaactgatgcagcattaagtatgaaaagaagaacgatatctagacaatcaagccgctagaagtttcatagaatggtagatatctcatataatctagatcaacgtcaagatctaacctaatcggctgtcttctgcatacagatattggccgatagtagtctagatggcgatattgctagagattatgtaagatatatgataacttgatgaattacataaacaagattagagtgtcatgaagatggaagcactaatcctaagaacgcaatccatcacgacgaattttacctcttgttgaagatcaaaatcgatgcagctcaacccaaaagcaagaaccccgtcgaaacaaaactaaagcaaaaagggtggcgatgcgccgaaagtgtgttgaacatgtgtgttaaaaattacttcgggctcggggtctatttatacccgaagattacaagatatgcccataccggacacgaccattatctctaacaaactctaagataccacaagtctttgcggcagacttttgcccacacttatctataaggaatttacataaaatatcctaattaatagatataattgccttctcaggactctatccatgcgtggcaatcatcctgaagtacattaacttgaacccgatgtcgcgcacaagtcgtattgtcggaatcggctatatcggcttatttagctcgacttgtcgtagccgatcttgtcgtagccgatctggacttcagccgattcctgccctgttttcaaactcgatctccgcttccgactttgcttcgatctaatcttctctccgacgctgatgttaccaaatttggttgttaacatgcatgtgtaagatgtgatagtaatattgtggtgaattacagtaaatcaagaattgaaaacaaaaatatataggttaaaagtctcatatgctaaccatatacttgttactgcacaaaagtaaaaagtgttactgcacggaaggtgcacgttaccacgtgtttatgcagtaacactacccaaaaaatacagtaaaacgcagtgtagtaacatcgtgatgtgattgtagtaacgtacaacatacaagtagtaacaagtaatagtatagtattactacttgtggagagacaaattgcaaaaaagtcaatctttgaagaacaatatctcccaagtgatgtaaggttttttaaaaccgtttgcatcatgatgctagaaaaaaaagagcttatcaaaagtagatccgtcatgactatatttcaactatattttaacgctgttattgcacgtaagacacagcgttactacacagtggtcgtcgtattactacaccgtcctgggacgagagctgagaagaggtgggtggtggggggagttagttggcgggtttgaccggtgggaggggcctttgaccgaggtgggaggtgggttttgggccttggtaaggagggggaagtgggtgtgacccttgggagggagggaggggggtatagaatagctattctatacccagggtgtagaatagttcatatatatatatatatatataataggtgcatgttaccaattccaagtagttatgttactgcacgatcgataatcgtagttttacaatgtcagttttacgagatgaagatcgaataggtgggctataggtaaagtctgtaggtggctttgagtgaggtctgattgatgtacgagtgttttgaacaattttatacatttggtaaaaccatgttactgcatgtatatacccatgttactgcaaattacatattctgttactgcatatggagtgctaaagttcaaaatgccaatatttgaaaagcaatatctcacaagatatgtattatttttaaaaccgttttcacaatgatgctataatgttactgcatgtggaggatatatgggttaatgtctcacatgctaaatatatttgttactacacaagagtggagtgttattgcaaaggcaggtacacgttaccacatgtttatgcagtaacactatctaaaaaattcagtaaaacacagttactgcaaaaacttataatttttactgcactcttatagtaacaatgcgatgggattgtagtaacgtgcaactgacagtagtaaaaagtaatgctatagcattactacttgtggagagtcaaattctaaaaaagccaagatttaaagaacaatatctctcacatgatgtactattttttaaaatcatttgcaccatgatgctagaaaaaaacgcttatcaaaagtagatccatcatgactatattttaacaatatttgagcgctgttactacacataagacgtagtgttactgcacgttgaccgtcgcgttattgcacagttccgcgagacagagccgagaagaggtgggtgataggaggagttagcaagtggtttgaccgcagtttgactggcgtgggatgcttttgaccgacctttgactgaggtgggaggtgggtttggccattgggagagaggtatatatatatatatatatata

SEQ ID NO: 51526 - DNA, 700 bp, Oryza sativa
gttgctaccttcgggttggttgccatcaccggtattagcactcctcctggttgtcaccatctgaaataccccaaaacaaaccaaccaacagagggagcagactattaaaactaaccacccacgactaccaaaattcttgaatttattactgctattaaattggttcattgaggttcaagttgcttaagcaaataaaataaagacaggctccgacacagtcataccacataccggtacaaccatgccccacgcgactccaacaggaagacaaacgagaaagaacacacgcgcgagcctactaactgcccgtctacttctgcgacgggccagggcggaaggtgagcagcagcgcatcctccgtgctaccaacgccggaggcttcccctcctgaggaaccacgggcgcgggctcggcacgaggggtctccacgaagcaggtccatgccagggactgacgaacaagctcaggcctggaggtgctcttacgggcggtgatcttctggctgcagcagacgcggcgacacttgggacggcagacctctccctgggcgaccttgagttgacacagctgcgcctccagcgcgtctaggtccttcttcagctgcagattctcctgacgcagctccaggatcttcatgttgttcttgaccaacccgcgacgcaccatctgatggaagtcgatacgggccgcgtcgtacgcc

SEQ ID NO: 51527 - DNA, 1465 bp, Oryza sativa
tgaccaaaataaaagttgtagatcttgatgagaggatcaactttgttgttgttgactttttcatttgaaatcatttactatttacaaatgctgtttaaattagtcatattgtgaaaatcaatttcaagctgttgggaacaaagttatctagacaaatgaccaaaataaaagttgtagatcttgataacctctacaattttgttgttgaccatatttcgatttgaaatcatttactatccgaaaatgtattatgactaataaaataaattattatatagctgctatatattttgtactaacaaatataaagacttgattggaaaaatgcaaaaaaagtcatcggtgacgggccttagttaaagcccgatagagattaatctatctctatcgggcattatcttagagcccgtcacagatgagtcatctgtgacgggcctgaatgtcatctcaatcgagcattagtatggagcccgtcaccaatgagtcatctgtgacgggccctacggcaatgcccgattgagatgacttatcactctactataacaagggtttctcatatcggatcgaaaaattttctaagtcctgctacagtttcacacctccttagaaccctagcgccgccgccttcgtcctccctcgccaccaccgccaccgagcccgccgcttccaccgagcctctacaccgaccagcgtcggccttcctcgtcgtggtcgcctgcctcttcaccgacgcgaatagctgacccccaccgagcccggcgatgtccttcctcatcgtcgtcgcctactcctcaccgacgcccgacgccgacctgcctgaccggcgccgccctccaccgagcccagcgctaccgccgcgaactccttcgccgagcccggcaccaccgccaccgagcccagcgccgcctccaccaaccagcgacgccctccaccgaacccggcgccaccaccaccgagcccctccccccccggctgtcctcaggtgagtcctccatcgcgccgccctctgctacctgtggtgaatgatgaaatgtggatgttgggatgaatttagtgatagatgattttagtgattgatgacatgttgatgaatagatgaaatgtggtgcattaatgaatttagtgattgatgatttgtggtgaacgaatgattttttttatttatgacatgttgatgaatagatgaaatgtggtgcattaataaatttagtgatagatgcatgatatgtggatgaatagatgatatgaggtgaatttatgattttaggatttgatgatatgtttatgtcgcgtcccaaaacgactctaaaatacatcctctaaattatgcctagaataattaaaatccgagtgaaagcctccaacaattaaaatgtgcaaagttaaaagtcaaataaggcttggaggatttttgtatatttcctaaaagcctaaaatgcgtaaataaattttagtggaattttca

SEQ ID NO: 51528 - DNA, 800 bp, Oryza sativa
attcctgcagcccgggttggcttgggacgagctgggacccagggtcgggtggccagttcggtctgaatcatcgtaggccttgggttaaggcaggttcgtgtgggttcacggccttgattaataatattgtatagctctggaatcgtgtttataaaatagctttgagcaactaagtgtcttttaatgctgtttactacaaaccctaaccctttatgttataacccccttgtactcccttgcatttgtcctgcacttgtgggtgtgtcttgttgagtacggtggttgtactcagtcttgctcaattttttcccaaacccagaagaggagcccctggaagatgaaggctttggtgtctagctcgtgcctgccgtcaagcgcctgtggtcgtcgccctagtcttccgctgtttcccgtttgtctttgtgtgtgctgggccttcgccgcccatgtaataattaactatttacgcttccgcttgttaaactctgaattgtatcaacttttggtgtaccttgcctcctgggacaaggaataatacacgcacgtaaggtgtcacgtcctgataaattcatcccgaaataaaaatcattttctaaaaggaataatagaattaattaaaattcgaaaagaaattggcaaacactaaaatacgtacaagaaaaattcaaatgtggcccggagaatttttgttaaattctccttggtctaaaaggagccctcaaattttagtggaattttcagagcacaaataataattattaagaaataaacaaagttaaaatgattttataaaaagaaaa

SEQ ID NO: 51529 - DNA, 668 bp, Oryza sativa
aaataacttcttgacctccgaaaattcacgggaaatttcaaaaagttttttagggccaaagaatattacaaaatattcccagccaacgatttttaaaggaaatttttaattccctctgtaattacttgattaaatttctctaacttttatttaatatctaggaaatggattattaaatgatttttaatcccgaacgaaaatcggggcgttacagttggtgcccgtcacagatgactgtcatctgtgacgggcttcttttagggcccgattgagatatggaaccctcatctcaatcgggcctcaactatggcccatcacagataagtgtcatccgtgacgggctttagttttatgccgatctaccatggctatgcgaccatatctcaatcgggcgaaacttcggctcgattgagattacttacttgtgacggcccgcaaattccagtcttgttaggggccgtcacagatggaaggatctgtactagtgggatttgaatttgagcctcctgacagcatcaacttcaaacgggaaccctaagcccttggccccggttttccccaaaagggaaaaaaggggggaaaaaattttttttttttccgcggggggtctatgatgacttgatggaaagctaatggagtctacttttatatgattttggtcacacgtc

SEQ ID NO: 51530 - DNA, 540 bp, Oryza sativa
gaacataatgaaacgttaacgaacgcgaaagaacgtgcacgaaacgttaacgaacgcgaacgaacatgcacgaaacgttaacgaacgcggacgaacgcgaacgaacgtgaacgatacgattacgaaacacgaacgaacttgcacgaaatgcttacgaacgtgaatgcacttgtactaaaagtgttagaacaaacgcgtttctacttatacgatttactggtaatacatatatgattatatatgtaatttggcccgtttagactaatacattttcctggtaatgttgcaaagaagacgtcggcgtcgtccctcaagccgaagtggtagctagccatcgaaggaattcgcgcaggcaagtgatgtaaataagtgattgttagagatttaatataagattgttagtcttcatatatataaatgattattacaattttaatatgagattagtagccatttaatataagattattagacttagcatatatatatatgactattacaattctaatataagattattagagattaaatataagattg

SEQ ID NO: 51531 - DNA, 1453 bp, Oryza sativa
cggcctatgcggcttccggattcacctaggcgcgagaggggactgcccgctgccttgcgaggagtgggggtgaaacctgaggtgtggtgtgcttggttagagggggttatgcgaagggtcctgtcacggcctctttccggtatgtcgtggtggcatgtcggcgcacggaaacgtgtcgtggggctgtatcttgtgggtacagttgtacacctctgatcagagtaaaactattcgaatagccatgcccgcggttatgggcggtcaaccagattcaccgtgattagtttcaccctagtgtaatcttttgaatttggatagtttaggtggatggttgggcctgttgcaacgtggaatagcgttggacagtggatagttaatattaattaattattacaactgtttaaatctttcaacttctgtttataagtgctcgctttatgcaaatgaaccactctagctcttctgtgataattccctgcatcatacccctattccggtatgacttgctgagtacagtggatagtactcagtcttgctctatttttcccaaccccagagtacgagtatgtgtcagatggaggtgtctctgaggagtaggcttcgtccgtgccgtcgaggatgcctgttgagtggtgttcccgctgcagttctagtcaaggcttagctcctgttgtctttcttttcttccgctgcatttatataagacttttatgatgtttgtaagacgtggatctgaatgtcaacattatcgtttgtgtaccccggccggtcctggacggggattttaatgcacatcctgcttggaattctattcgggaatttctgggcgtgacaagcgcgtgtgaagatggaaccgtaggcccgctagtctgctgctgtttatttttgattgtcaggccttaagtgcctttgtaataatgtaaatattatcgatataataaagatgtgtcttttatatcatgtttgtatggtgtaccccggcttttcctaggacggggattaatacactagcgttcgggaaagtgcaaattttctcggtcgcgacagtatcattattttaattttgatttatcccccctaaccaatcttaaattatacggtttggaaatatgtgaatagtaaaagtatatttccaaaccgaataatttgtaatggtatgatctaattaacccattttgtattggctttcgctttgtactttactgtagcaagccacaaccacgattgattgaaaagtggctcaaacaaacgagctcaatatctccaaccttttagatataataaataaattatgaaattaatggactggattttagtacttatatcaaccggagggatacttgtattaagctgggaaggaagttatcatattaaacttaataaaaataatttaaataatagatatcatttttctagtagctatataaaaatttgacaggttttgaaaaaaaaa

SEQ ID NO: 51532 - DNA, 3590 bp, Oryza sativa
aattcctgcagccccaacttgaaagttttggtgaaaaaaaactgtcaacgatttcttagcacatccgtttttttaagtgttgcaatccttttttttttctcgttttgttgcactggttgtgtatgagcgtttaactctctttttatttggaccagtaaataactaaatatgccatgcattgcacggccaacactattgggagtgggttagtcgtaaatttgtcatatatcctaaaagcacatgatctttctgaactaaccgtttcttttttttctatttttctccatcaatattttttctttctatttttctccattaatattttttctttaactaatcgtttctatttgagctggggctaagtcttcggactgagatcctctattttaagtcaagtaactttaaagtcactgacatgtacatggatccatagcaaagaaagtccatatcttaagctcagttcgtttcccatggttcccaactcccttctcatttttcgcgtgcacgcttttcaaactactattttggtgtgtttttttgcaaaaagtttctatacgaaagttgtttaaaaaaattatattgttccatttttgaaaaaaaaatgagctaatacttaattaatcacgtgctaatagattgctccgttttccgtgcggaggagtttggttcccaaccatcctaagcgaacacagccttaagtgacttaaagtcagaggatctcgatcccaagtccctctatcttgctagatcaccatagagaataagaaaagaaaggggaggaagaagaccgaagagaatcagagcaaaccctccaaattcaaagttagatctacccctggatatacgttatgggaggaaagaagtacgactccgtttttacagagaatgttatgtttgtgccttataacgagtcagatccatataataatgggttaaatagatccataccattacaaattatttggtttggaaatatgccattactattcacatatttagaaccataccattataatttttagctatttaaaatatgccactacatacccatctgatgcatccaataaacattttagaccaaattacccttttctttttctactgtccatcttcttcctctcctttctttctttttggatttggatctgatactggcagcttatctttctcctcctcatctactcacccattttcgcttgaacctaagcaaggccactcatgtactctcgcacccaaaggaaggtccagcaacgacatcgagccatcatcaacaacttccctgtttatttttttctcgtttttgtttctctagaatttgtactaaagaaaaaggaaacaaggaccacccactccacctttggcccgacgaagatcaagcatgcgtgcatgtgagcaaatatcgctggcggtcatgccttgtgcgactcgcagccgccttgcacaagtacgagagcacctgctgcttcgagagaagaagggacgaaggagagagaagatagaacatgggagagaaagaagaagagaacgaggaagaagataagggatagtttggtcctaaaatttttgcaaatattttgaagaggtagctagtggcatatctctactacttaaaaaataaaagtgcttccattgtccgttaaaaaaaccgggcgaaaaaaccgaatctatctgatccaaaaaaaccgggccaaaaaaaccggaaaaagaaaagaaaaaccaaacgtcaataaaaaccagtcgttaaaaaatgtccgatcaaaaaaaacgggtgaaaaaaaaactgaaaaaagaaaagaaaaccgaatcggttcgatccaaaaaaaaagggcgaaaataagtgaaaagaaaaacgaatccgactctgtcaatgcggtaaaaagagggtgaaaaaaatatgtccgattccaaactctgcattggtgaaaaaaattgatgtgccggattgaagatctttttgcaaaaacggaacatacgtgtcgagagcattccatttttatataatttttatttttagtttgtacttttgcatttaagtccctgtaatttttatatttacatttaagtccctataatcttgcaataagatacttgaggtcgtttttgttaaaaaaataataaaagagagagaacaaaggcagaaaggtgcattaaaagaaaaataaaagctgcacaaaaaagaaaataaagaaaaacaacaacaacaacaaaagtctttttcccctaagtggcgaaaaatactgtagatccgaacggaaaaaaaatctgatttatataaaaggcaaaaaaaaagtggtaaaaaaaatgctagatccgattcctttataaacggaaaaaaagtctgattcctataaaggccaaaaaaattctaaaaaaatatctaaaagagttcggccgattccctaaaaaaatggtgaaacaaaatccaatttctaaccagtatatatctcttctctatctctaatctaatctaactattttaaaagagaaaatgtacgagaaaataaaacggttcaaaaaaaatgtgtgaggcaaaagtcagaaaaaaacaccaaaaaaacatgctaaaaatgttttccatctttaataaaaaaaataaaaaatgcgcgagaaaaattatttctatcgtcggtaaaatattttttaaaaaaacatgcgaggaaaaacctgtctgaaataacgcgtcatttctaaaaaaatggttttaaaaaaccgcacaagaaaaataacaccgtctactaaaaacaaattgctttaaaaaaattgtcagaaaaaagataaattgatggacgcttgaatcgaataggatcattgattttttgccaactactatatggctttatttcgtcatatattctcttgtattggaaaaaagagaaaaaaagcattcgaaaaaaacaagcaaaaacaacatgcaagaaaacaggcaaaaaaacacacgagaaaagaaaagcaaaaaaaggagaaaaatatagttttcttcatcagtaaaaaaaagaaaaaaacatgctaggaaaaaacttttagaaagaaatgcgccatttctgaaaaatggtttgagaaaatcgcgcaaggaaaaaaatacactgtttataaaaaacaagccgcttattaaaatagaaacattgtcattgacatgattatgcatgaaaaacatatattatcattagaatttttttacccgttacaatgcacaaacatttttgctagtaacaaataagtgtgaaattataatggtataaattcaaatagctgaatagtaatgatatatttcaaaaccgtaaaaattatagtggcataacccatacaaaatacttgctgtactagttgctatggttgtacagctatgtttggtttcgaaactactaatgataatcagaattttcaaagtttaactaaatcttatccaaatatcgaatatttataactgtagagtacttcatatataacacatattagagttatcaaaaaaaattcaaggtggaaattacagtagcagagtagagccaacaacaaaataattcagcttggacaattagtagtagtgactagtgggctttacacagccaaataattcagagggctgcaggaat

SEQ ID NO: 51533 - DNA, 2085 bp, Oryza sativa
cagaggttgacttgagaagtagagggctgtgcttggtgcctgtctcctgcacccctcaagtgtacagagataacaatggcccggactactggacgccaccctatagaagctgcttataccgatgaatttattatatattattggtgttcattgtttattattattaattactgaataatgtgtggtggatataagattaattattagaagaaaaaggatattcatagccaagtaagtttaattaattagagctctatttgtgtacggccacaaattagttgaactttctcaatgtatcttcagctggtttgttgttgatttgtaggtatatatggttcgtgtgatcagcatcgagctattaatcgattgctttcctgtactgatttaaccttttttttttacttcggagttatttgatcaatttaattgagtgatagttaagtgtatatattgtttctttatttgtgcatacgatacagcacaggtggatactagtatgccacacatgattcatggcttcatgcagcgtgatgatatcagtttatttggggcgccctaaaatatgcttcgccactttcagatcatcaaagggataaaattggtgtgtggatgcttgatttggacagtttacggatacgaattatattcacctggaaatgaacttaattactccttccgtttcaggttacaagatgttttgattttggtcaaagtcaaactccttcaaatttaactaagtttacagacaaatatagtaatatttatattaccaaattagttttattaaattaataattaaatatatttttataataaatttatctttggtcgaaaatattactattttttcatataaagttagttaaacttaaagcagtttgactttaaccaaggtcaaaacatcttataatctgaaacagagaaagtagtcatttattttttaaccgagtatggatgcaacaacaatattatctagaaaaaaaatgtggatatggattatcaggagtttgacgcactactaaaacaggatttttttttcatacaaccaaaaacgatcttcgcaaggggtcgaatagcctgcctacatacaagtgtatgtggaaacagcgcagtagccggcctaaccgcatgagtagacccattatcgtaggcgggcctcttaacgtagctgcctacgaagatagattatcgcaggtggccgcattaagaggtccttcttcaataatgagttaattttcatatgcggcctatataactcatggttgtttgggaaaattacgcccgctatctaattttgcattccccgttagttttaatcgaaatttgaaatgctacacacaggatctaaccaagttttcgttcttagcacagcaattagaatctacaataaacaagttttcaatatagaaaacagaaaacatttatatacgtataaacatgtttgtcccatatactacaaacgatcagtgatgtcaaagcttatatgaacagtaatgtgagagaagaatatatgccacgtaaattgtttttttatgtggaggcgagagagtggggagagaaattattgtttgttaattaccaatctatctgacaaagtggcaattatactctctatataactaaatcactataattgtagtatgtacataacttattatacggttatctgtatgtttaagtataacatgaaaatactacatacagcggccctctaaaccattgttcccattgttcatgttgttaactcgtaggcttatcttactctagcctgaattttttaatttttttagagagagggaattcagaatatttccattaacaacacggtagaaggtgagtcgccggcaacaaccaaatcaagcacacgatgtttttttttaaaaaaacaaccacgagatagtggtgacgtttctattgatatagcagggaaaaaaataaagtctatcgtattggagactatagtcaggaaaaaaaaaagacaaacacaccacgcgtctacgtctgatcctattgctaaaacagaacaagcatacaacgctactatgggatgggtattctaaacaatgccactaagcaggaaaacga

SEQ ID NO: 51534 - DNA, 1118 bp, Oryza sativa
tatgcattgtcctgcctccgtcctaaatcgggtgctgagcagatgaggaaaggcggtgacgggaggcagtgacctcctgattcctgagcctcactgcttccgctctttcccgcatcagcatgactcctagcaagtgatacatttcggcagagcgagtgagaggggcagcagcagcagcagcagcagggcctttctgcgccgtgctagggatgagtggtgagctactggattttgattcaacttagagtatttctcttttactgtttttttattcgaatttcctttttcagagttccagttgtttcttccacggttcaagattgtttgtgttttcccctagattgaattttcactgaaaaactttgaacgctggggaccaggagagaattcacgctctttcatggtggatcagagatgagaggaggagcatgtcatccatctactccatgccgtcccctctcacaatagatggagcatgtcttccatggctcgattgggaggacgagctctagaaatagattatgttcttatttctccactctgttaaatcgattcgttcagttttaatatcacaattgatctcctggcaatactatcgatcactttttatctctttttatccgctgagttgatttcactttctgtttcctctctcgcttgagcgaaggcgtaccgctacggacgaaggtggcaaaattatggattagcgatgcgatgtgcgctatgacagaatgcactatgatggacgaatcagagggtgacgattggaaaattacgaattttttaattagttaacaattaacagctcttccaccggtttaattttaaaaaatacctccaaatgattataagccagataaattcatattttatggataactttaattgtggattacatggctaaaattgtgaatcaaagttacaaccacattatttatagtggtgggtggtgtgtccgtcaatggctaggggtgtgtagtgatttcgtcgtgagatatgttggtctattggtctcaaggaagtactcataaggatatagtcggtataggggtgagtgtgcacgtatacaagtttatgtttcccttataaacgttagaaaaactttattatggtagggc

SEQ ID NO: 51535 - DNA, 550 bp, Oryza sativa
cctgcgccccccatgtaataaagaactattcacgcttccgcttgataaactctgaaatgtatcaacttttggtgtaccttgcctcctgggacaaggaataatgcacgcacgtaaggaacgcccgttgggttatttccagtcgtgacatgcattgtggacgaaacttttaccattatgtggtcgacggcgctatcgaccgatgttggattttccgccaactcagttgatgcgcaactgctgcgtttttaggtgggacttcctaactcttcatacgcagcagcagcggcggcctgggggttctgttgctcttcttggatctcttgcctaatcttggccctcattgactcgagcttttcgtcgaattcagatgtcagctcagctcttattgacgcccggatcttggcttcaaggcgtgcatctttctccgccttgttggaagtccgcttcttgtactgccacgcgtagtctggaaatccatacttctagggaacggaagacccaacgccccgtgtccgtccacgatgttccttgttgcccaacgctttcgtga

SEQ ID NO: 51536 - DNA, 1348 bp, Oryza sativa
caagaaaggtaaaccagcatgtttctttgtcacttggaccgttagtgaaatgcaggtacctttgcagctttgctgaagcaatgaacttgcagaaaacaaaaatgtcaaaatcatcgaatgcgactatttacttgaggaaacatgtaggtgaaccattattggtaggtaatacatagagagttccgaaaatggcaataacaaacgcttagtaaaaagaactttaatgaatgatatggtacgctgcatttaacccacttaggtatacacaatgatgaaattgtaaatcacaatgaatcaagaagactaaacacctagatagaaaccaaaaatcaacatgcatatgaagttctgaacatttcagtgtaattcattctcacccatgacgcgaatgtcttgtcatcctgctccctgtgggctgtggctgagagacccttgttgaacctttgcacacatcttgaaataagaatcaatcaaaaaatgaagattggagtaacaagcagcagacgcgctgagtaaatagtgacaaggtaaataatgattgattggctacaccggagtaggagcaccaagcggacggcaatgccatgaggagtaggaggatgcggcagcccaacagatgaggaggatgtgccgacaacctcaccgctggcagcaatgccagctgctggagtcggagcaccaagcggacaacggtcagcggacagcggcgctgagatctgaccgaacttgatctcatggccccattgacaccaccattggctcggccggcctcaccagacacgacgtcgcctatctctactaccgcgccgcgggaagccacggtggggcgccacctcgcgcagcaccgggcggggatcgaggcgcgcgcgcgacgtcttcgccatgtcgggggactttaacctcacgctattcaacgagctcgaggtcgagctcgtcgggggagagcctagtcgtaggtgcttgctgcaaggagctcaacgccgcggatggagggatcggcgatttctctagaatactcgattattttgccacaccttttcttcgggagagggcagggccgtgaggctgtggaagggcgaaggcgaggcttgattcttgaccctgaaatcgtatatagagatatctataatcaatctgtaaaccgaaattactgtttactggccacgcacggcattttaactcaaacttttgtaaccgaaagcacaaatacgtacgttaccgcgcatcaagcgtggtgatattgtctacaatctactatacagtgcggttatgaaaatgtcaaaaaaaacacaagactaaaactgaattatttgaatttagttcaaaaaagaaaaggaaaatcttagcc

SEQ ID NO: 51537 - DNA, 671 bp, Oryza sativa
atcgggaataaagcgtacgcaccagcccacgcacaagcgcatgcgtagcccatccttatctctttttcttctccttccttatcttcatcctctccccttcctcttctctcaccccctctcctcctccccgacggcggcggcgggatgggggatgggcgcgggctggcggcggccggccggcgggggcgggatggaggcggccgggcgcgggctggcggcggccaggcgcgggctggggctggcggcggccggccggcggcggcgggattgcggccaggcgcgggccagcgggatggaggacgggcggcggcggcccggcgtgggccggcgggatggaggccggtcgccggcagcctcgccctcccctcctccagatccggccagaggggaagcggcgggatggaggacggccggcggcggcccggcgcaggccggcgggatggaggccggtcgccggcggcctcgccctcccctcccccagatccggccggaggggaagcggcgagatgggtggccggccggcggcgggatgggaggccggccggtgagtcgatttttttttttgattttttttaatttgtggtttggatgttttgatctgtgaatgaatctatgaatcgatattgtgaatgaatctgtgatgttgtgaatgagtatgcgactcgatgttg

SEQ ID NO: 51538 - DNA, 675 bp, Oryza sativa
attttgggcgctgcctgtggaccgcccgtgctcttgggccacggcgccgcctaggccgcggtggacttggtccaccgtgtgccctccccttggagccgctgacgtgcggggcccgcgtgtcggcgccggcttcccctgctgacatcagcggcagcccttttcctttgtgaaaatatttaattaatgcgtcataaaccgataataattatagaaattcatttaatggctcaacaacttctaaaattcatatctaattcattcgaactccaaatagggcgattcaacttgcaaaattcatctaaaattgagctgtacatgtctgtttactttttatgtactgttttcttggtttttattagagtttttcctcgttttgcgtgctagagtgtagtttctgccgttttggaagtccgctgttgcgaggaaaggagtttagaagatcaaagtgaagaagtaaggcaagtcacacattccccttgagcattttgatcctactttacaaatgttttaccgtttggaaataaaattgcatgtcttgctaatacatgggatcagggtttacctatcttctcgcttgtgccatgtttacttgatatctatcctttgtcaacattgggtaataaattgactagctcatgttacttttgtgacctagctagaactatatgcttaacc

SEQ ID NO: 51539 - DNA, 905 bp, Oryza sativa
cctgtagaatttttcctctcctctcccctctctccgaactagtgcagaggagagagatgtgcaacttttttatttttattttatttttttgatttttttttcacacttaggaactcacaggaaccaaccatgtaaaaaataaattcaaacggacgaaatatgtggcatgtgaaattttccaaagctctaccgaaacacttctctcctcggaaacacaatcttgcaagtggaatttggaggttttaaatcggatgtaactttttctgtagatgtccgtgcatatattattttaatagatgacatattttgtccgtttcggtagagttttagaaaattctacaagtcacatattttatccgtttgagtttattttttatacggttggtttctatattctcctaagtgtgaaaaaatatcaaaaaaatgaaataaaaataaaaaatttgcatctctatgtactgtttaacttatatatatcatttcatgtggttatattttgaattagattaagtaatttcatatagtggtagagtgcattatgtttaacatgctgatcaaagggttttactaaaggagttatggtctaattttagtgaaggtgcaaagtagactaagtggtatgctagctattttcagacttagctaagtggtagttcgagtttaaattttttttgtggttagttgtatcatgatcctgagtgtgaaaaaacatctgaaaaaataaaataaaaatgacaccgttgcaactccatacagagaaacagaaatggaggcgggtggggggggcggcgcaagccatgctggcgccctcctccctggggcggcgccagcatggctggcgccctcctcctgccacgtcggttcgcgtgcgccatggtggcaggaggacggcgctagagaggctg

SEQ ID NO: 51540 - DNA, 2171 bp, Oryza sativa
aattcctgcagcccagattcaccggcgactaacagaccccaaccaccgcatccggctgtatcccgttgccctcttcttccttcagccttcctgaccattgccggcaccgcctcccctctctgttgccgccactgccttctcctctaggccaccggattcagcggccacgggcatatggctgccggatctggccatcgcagtggctaggagcggctggaaacagcggcatgatgcagggagagagatagggacgagtggcgagggcgagatagggtcagtttagacatttcagaccgaaatttcggtcatttcggttccctccgatacgatattattccggccgaagtttttcaattttttaattttttcataaatttgggtaatatttatttaaattcaactaaattttgctcaaaatttcggaaatttcggaccgaaatttctgaaatttcgggatttcggtgacccccgatataaaagcacaaaccgataaagcaaaccctagatagggatgagtggcgatgtgggtgaggtcttttgtttttttttttccttttctcctttgtttttctaccgagagattggcacaaacttaatatagggtactccctccgctttaggtcacaagacattttaactttggtcaaagtgaaactatttcaaatttgactaagtttatataccaatatagtaatatttataataccaaattaatttcattaaatcaataattgaatatattttataataaatttgtcttgggttaaaaatataattttttttctacaaacttagttaatcttcaaaacgtcttataacctgaaacggagggagcagcagttacgttttgacactgatatttgttaccgtattttttaattagtataccatcggtcatattgtgcgaattctttttttaccactttgctagtaaaatatctccattatttttatgttgagaatgctaccgtgactttgaacaccaatattattctttgcatgtgataaattgtttactactatccaaataaaatctctatctctactattataaaaattaaagatgtttccttcaaaattttagtacaccatccgtgtttgagttggttttataatatttatctgaatgtctaatatatcattatacctaatacctataataaaaaataagcaaggatttagtgtatttgatttcgtatgtcatccgtacgtgtctaatccgttgccgcgcgcctccagccgttgctacaccgctcaggccaaaccctaacgccaccgccacatcgatctacctccccgtgagtttttcctctaattaattgcaaaaatcgattctccattcctccctcatccttccccatgatttcctcttttaatttggctttaattcactagatttaatatcaatttaacagtagtgaatgatgcccttccggtagtgaacttccccagctgtttttattccgggttttgtggattcgctccaattttaggaaaaattgagagaagagatcaagtggatcaaaagttctcaatcaattttggaagatcaagaaagattcaacttgatttgatagggattggcaatgtataggcacggaactatcttccgtaagttaagaggcaggcagagtgaatggaggtatgtcttccggaagttaagagaggtagacagagtgaagggatgtaggaggcaacgctttttcaattataatgtatagcgatactgatgtttgatgttttattttaagtatatttcaataaacagacgtaaaatcttgaacaaattacaagaaaaaatatcacaagaaaaacctcgcaaaaacaccacaaacaacagctgagtggatgcaatactaccacaaccaaaccttacgaaaccagctcgctaacaactaaaaccattcattcaaaggtattgcattcactgtttaggcgctgaaaaaaatattagtggatgcaatactaccacaaccaaccttacgaaaccagctcgctaacaactaaaaccattcattcaaaggttttgcatttactgtttaggcgctgagaaaatattatttctatagatcatctccactaatttaaaactactatatccgttctaaaatataagttattttcaccgtatgtgatatgtcctaaaataccaaaagtatcacatccaaata

SEQ ID NO: 51541 - DNA, 1376 bp, Oryza sativa
cacccaatttaccatttaaatttagtttttaattttattttcaacagcaattacattttagtccctatgttttctgtaatttagtggaaacagttcatcagttcttcacattattatgtaatggtcctatagaccactgatgttatgtgttaattaacataggtgtttattcaaataccctgtttcactaaatttatttgttgtcttaataacatgccttttgcatattatttcaagacatgctctactttctcgctttattaatttacaaaattctataaattttgtactttgatttagcaaattctcttaattatgtacaacataattaatggaggatttaatgcatgttccacttcacattttgacttggaaattaatcacatgtcgatggagtcctatactttggtcatatcgaccataacttaggcagcgagtatctcgcccatcatcaagtggtctacattttgagatgattacccgatggagtcctacaaattgaccgcactggtcataacctaggcagcgagcatttcgcccatctcacagaggtctacatctcacgatgattacccacatgtgttatttttcgacaatatgttttgaaaaatgagattatttgaaatttggttgaacacaaggtagtggagtcctaaacattggctgcggtatattcaccagaatatatttgcctggagactgtgttttaggcaacaagtataacttgcccactattaagagatctactccactgtttaattacttggagattatccacattgtgccacctaatttcgaattctaactcaaaattgccaggtctattacctgcatttttttcgaaacattacaaaatatgaagttttacattacgcattgagattacaatcttaatatcatatttttattaatttacctctgtaaattgataatgttaaccatgattatagggacatggcaacaaaagagttcgacgaactcgccctcaatgggactaactatcccatctgggcttctgatatcaaaatcatgggcttctgatatcaaaatcaattttgcctcttgggggattttaaatacaattgaggaacccaatgatggggacccggcagttgagcccaggaagctcaatacaaccctttttcttttgacactctacattcacaaggatctcaaacatgaatacatgttagagacgagccctctcaacctttggaaagctctaaaagagcgttatgatcaacaaaaggaactcatttggcctgaggctaattatgagtgggttcatttacgcctacaggactttaaaactgtggcagaatacaaccatgctgttcataacatttgttccaggttgaagttttgcgaacaagagc

SEQ ID NO: 51542 - DNA, 660 bp, Oryza sativa
attcctgcagcccaaaataatgacatatcaatatatgaaattaataaacaacttaacaaatcggcccggcggcggcgcgcatgcggcagcggcgcaaagcaacgaccgacggcgatcgtccggcggcggagagcggcggctagcggctctaggaggagaggaaggggaaaaggagggaggggatgcctcaccgagggtggccggcgcggaggaaggcgatggcggacggcgacggcaagccacgggaggacggcgtcggctagcggacgagctccggcgtgccctaaggaaggagaagagagggattagagagagagagatggaccatggcgatcgggatccatggccgaaggcggcggtagaggtgacgctcacccgtgcacgtggggagggggttccggcgacgaacctcgacggaggaggggtggacgaggtggacctcggccgcgcgaagctaacggcggcgacggcgtgagacggcggcgagcctagcggcggctagcggcggccggagtagcaaaagcggcggcggcgggtggttgcacggcgcggaggcgttggggggctcgggagaggtcggcgcaatggggaaaaagcgagagggggtgccggcgatgcttaaataggggatgggggaaccggacgtggccgggagcggcg

SEQ ID NO: 51543 - DNA, 686 bp, Oryza sativa
aattcctgcagcccatactactctatactaagattttattttacagtaagtagaatatactaaacataagcttaatatacttagatgcgacaagatcttaacataaagggcagatttaacatgtcaatcaagcatatagaataaaagtagttgaatcagataagattggctgaaactccgatactaccctgataagcaaccagaaagcaggctagagattgcaattctaagcacgacttaatagatcaaactcaactgatgcagcattaagtatgaaaagaaaaacaatatctagacaatcaagccgttggaagtttcatagagtggtagatatatcacatagtctaagttaacatcattatctaacctaatcggctgccttccattaacagatgttagccgattataggttagacgaagatattatcaaagattatgtgagatatatgataactcgacgaattatatagacaagattagagtgtcataaagatggaagcactaatcttgagaacataagtcgtcatgacaagttttacctcttgttgaagattgaaaccgatgcagctcaacccgagagcacgaactcgtcgaaataaaagtaaagcataaagtgtggcgatgcgtcgagattgtattggatgtgttgttcttttttacatagggctcgggtctatttatacccg

SEQ ID NO: 51544 - DNA, 668 bp, Oryza sativa
gataccataagtctttacggcagacttttgcccaaacatatctctaaagaaattacatagaatatcctaattaatagatacaattgccttcccaggactctatccatgcgtggcaatcatcttgaagcacatcaacttgaacccgatgacgtacaccgagtcatattatcggaatcggctgtatcggctaatcggctgtatcggctagccccgtccgactcgaactctgtcgacctaaccttagccgatttggactgcagccgattcttactctgtttccgcaacgatcttcatcttggattccacttcgatctgatcttcatctccgatgccaataatgatagaatttacgaaatttggttgttaacaagtatgcagatttctgaccagatcgtacccaaggtatgatagagatctaacattcttatattcatgtccttgagacaaattgttgcaacgagtgaatcattttctgctctatggaaatttgctcaaatccttcttatttgtctctctgctgtgcatatatagctcatgttactgccttgcttccaagatattgggttcaaatataagataacactaataggtatctgttgttccaaccatgcataatctcaatctgtttaactaatgcagactctgtttgcttttataatggtcatttt

SEQ ID NO: 51545 - DNA, 521 bp, Oryza sativa
  unsure (1)..(521): unsure at all n locations
cgcagagggacctttaggctaaatgaacaccggctgtaatatgttatgcgaggcagatgatgaataaattcgtccaccgtgactagattatgaaaagtatgttgtatattgtattctcatgtatacgatcaaaacattaggttagcagatattataaatataggatcatttccttttcttcagtttgatagccacacgagggagcatggaggnnattattgcaaatgtgaagccacggtggattgccatgtcaggggtcgtagccagtcagtcgtgctttagtttttagccctatgtaccatgatatattaagtcaagattacggctccaaatatatgattcacaagattatggatctaagtggtaccacgacacaattaaaagagtactagctactctaggtttacactttattttataatacacttgtgaatagagcgagagagaaagagaggtactccctccgtttcacgatgtagttcattttagcatttcccacatttatattgatgttaatgaat

SEQ ID NO: 51546 - DNA, 829 bp, Oryza sativa
aaaatctatatagaaaatgactgatcagttcattcatcatactcctatatccctatatagagttcatatattactcccaaaaaggaatgcatcacatcacattattggaatgcaactgagagggtgatatataattgtaagttttctagtgaagtgcaattgaaaaataagaagaaatatattactagagtatacaaaaaagagatgatgggtgcatgtattattattgattgtcacatagctttagtttttccttcacctgatccgtgcttagcttatacagttctctcctcctaccaaacgaacaaaaaattacaaactccctgactgattgcctgcagtaccgtatcatatccatccatccatgccttcgccatggctgcttttacttgcttgcttagcttccaagatcatgagattatatcataaacacaagatgtttaaaaaggagaggagaaatatgagagagatttacccatttcaaaaaaggcatctttgcactagagtagtatagcaaaagcagtgatggcctgaccctagctaagagcaaggcaatggtggtggtggcaagtgtgatgcatggctagctgatgagaggaggaagaagaaatggctatggctaaagtagcttagcttagctatggctgcccatgccatgccatggctcgttgctgccgccttgctgttgctgctgctgctgctggtgctggtgctgtggctgtccatggtgcggtggtggtggctcgtagccggccatgccggcggcggcgttcacgtggcccatgcacgacgagtcgaagccggcgaggaggatgtcgcggtgggagaa

SEQ ID NO: 51547 - DNA, 3645 bp, Oryza sativa
ccttaaaaatcatgctttgtgatctgatggtttgatcccctagactagagaacctccaaaagattcatggacatgcataagattgagactgaagcatttcgacagccccaagaagacatttgggaggcatcttaaagcttataggagcataaaaaagaatgatgtagggtctctggttaaaaaaaggatttggacatttgacagtccaatgcaaagcatgcacatgcaaccactggcttaaacatttttagggtctctggtgggggtcaccacatatcacaatgtgaagaatgagagggtggggcccacaatgtcagctatagttttcacctgaaagagataaaaaaaaaagttaccaagcctcttttttttatgcatgttgttgcatgctactgtttttagggtggtgccagttatgtgatgcaacatgctccattgaacagtgtagtaggagtatatttttgcgcacactttttttttagatatggtgcatttatgtgtagatggggaatcttgacagaagcaaatactaggctacatgggcctacagtacgtagtgcaccgagtggagaaatggagtgtatttttcacaaaaatattaggggtgtttagattagggttgtaaagttttagcgtgtcacatcgggtattatatagaatgttgtatggtatgttcgggcactaataaaaaaactaattacagaatccaactacgagacaaatttgttaagcctaattaatccatcattaataaatgtttactgtaacaccatattgtcaaatcatggagaaattaggcttaaaagattcgtctcgtaaattagtcgtgatctatataattagttattttttagcctatatttaatacttcatacaggtgttcaaacgttcgatgtgatatgctataaaattttagggtgggatctaaaatttagtagtcgtttttgcgtcaactcagatgttccttttttttcatagtttctagtatcattgttttgggagttccaacgataaactttcgtccatcactgacgcgccgagattgtgagtgaagaacatagggggcgggtaagaagattcagtctaattgtctcgtgacctgaaacttgtaattgcacaagtatttagaactttaacatagagaaaataataataataaatcttccaacctctgcacaatttctatatgcgggggcggagccagccagaagctaagcctatggctcaactttgttattttatcctaattccttataaatttatgactagatttcacaaaactatatatatacttcaaccaaactatcataaaactacagatttaaggtgatgtgtcgaaaaactacatattcagtgctgaagttacgaaataactacaaatttaagatggaagatcaaaaaacaatatgttttgtacaaagttaagtgcataactacaacatttgtaactctcaacatgatagtagtggcatctgtgttttgtgataactccaatactcaagctgtagttttttatacttggccttaaatgtatggtttggtgataaatcttatattaaatatgtagttttatgatacaacactttaaatctatagtgttgtgataatttagtcaaagtaccaatagttttgtaaaatttactctaaatttatatgctcctataaaatttatatgaaatttacatagagtttgattcctagggctagggcttaagcctttatatgaaatttatagcctgaattcgcccatgtttatatgcatgggccaattctattttttagataagtcgtaaaaacaatatatattaggttattaccaattataattcctcttatgtaatcaaatgtttccgctacttaaaaaaacattttcacaggtgggtaaaatccgtttgcagaggtaggtcgatggactgtctctaacaaaatgccagtggagaaactgctatatgtgcgaatcaacttttggatagggttttagactacatgaccatcattgttattataagaggattttcttatagctcatcagtaaaaatgaaacccatgtgtttgtgaaaatagtttctagtgtccctctatgaaatataagtcatgctgtatatccatacaatcagttaataaaatgttagtcctttacatatgtgcacaggatttaagatatactgctagatgataccctgcacgttgttgtgaaaatctttatgaaattaaaataagcaaatcattgagatgaaattagaagatattgtgtatattataagcatgtcacaacttgatatgaactaacaaaagatataagatcataatatgctgatataattaataatcgattgctagtccatttggttgtcaaaacagaactgagtgttgtctttttttacatgatgtttttaactgtttctttacatgatattaacatgacatatagcaacactggtctagaattgatgatggatgtggctgatcaacttctagattaaatagagataattatatatggctacgaggtaaattcaagcggtataatgtataaaactgaaataatctgtgaagaataatcaaatggtcaatagtaaaggtactttggggtgatctggagctctaaactttgatctaattgatgaaatttattgagctaatgtggtgcaataagagaagaggaaaacaattttaattgtatttagtgggaataaattatatagacatatatataggataaaatatatttaaatgactttctaccctttcaccctttgagaaaagcaaaggggagaggaagtctaaggatgacttctacaataattgatggctggtacagtgcagtgttactctgccgtttgcaccaaccgaataacagttccataaatcaaacggcttcaaagttcaaactaatataattatcgtgtaaaaaaatgcatacataccagctttccttgtctgagctgtaaaaaacaataatacattccttgatcttcaccacaaagtttgtgtctgtattcaaagcaaagtgtaaaaaaaagaatgtattgtgcacaacttgtgctaaatgaaagagagaacttttttttagagggagcttgcacaagcagtactaaacctgatagtatatacttaaataataatacctgtattttttaatttatttctttataaaatgtcacataggattccatccacttgataacatggtgcatttctatcaaattaatttatccgagataaaaaaaataaaagcaaaacaaataccgccgcccacccaacatacatacgtgtacgtaagccaagcttaattagccttccgtgtcttccaaacccctataattaattaagaaaaaaaacccaaagattcgccaggagcctagtgcgaaaagttaaccgctaattaattaaaaagttaatcctgattaatttatcttaatgcttgatctctcaggcaaactagcagctaggccggattagagattagattaggaactttttggagctatcatgtcgccggccggttgcatcagtgtggggcccacgcgtcatcccctcaatggtgataactaatgggattaattagccatggaaaataaatattaattaatcttaaccaatggtgattagcgtgaggaggagctgcctaatcaggggccactg

SEQ ID NO: 51548 - DNA, 771 bp, Oryza sativa
aaatagccacccgatcgatttgtgaagctttggaaagatgtacataaaggattcttcatgtgatgatgcatgcatcgagtataaccgggttcaatgttatatatgatttttgactttgtttgctattgttttgtttgtcttgttttggtttgttgtttaaattgacagagtttttattaatcggaaaattttcttcacgtgttgtaatacacaagtgtatttgcttgtaattataaaatatgtacttgtcaataaattgcgttgtctagctatctcgttttaaattaaaataaaaacataaatttttttgattttttaatcaagataacaagaggcaaatcaatagaaaattaaagaattgtcagagtaaaagtaaagactgcatagtatatacaaaatatatacaaaggctgaccaaacacttacaatttatacctacacaatggtcttgctaaccaccagcaccatcactattatcttttagacgtcggtagtatagatgaagacacgagagaactgtgacgcacgattgagaaacagactcaggagatagggcacatgcattggcgtcagaaaagctatgacggatctccatatttagtgtgctgtggctgtaatggatgcatatagtggagacatccatgacacacgatattgtacggccagcgaggagcttgttccccttctcatggctcagccgtagattccaggccaacgaagcctggtgcgcacctacaccatagtcgtagatgccacttgttcctcaacacc

SEQ ID NO: 51549 - DNA, 1605 bp, Oryza sativa
taagccattctagcaatgtaagttattctagcatttcccacaatcatattgatgttaatgaatctagactgtctagattcattaacatcaatatgaatgtgagaaatgttagagtgacttacattgtgaaacggagggagtatgttgttgttgaaaaaaatattagcttcttcatcttaaaaaaagatagtattagtttccatatagatcaatgactcccatcatgctaataagagatgtcttttgatatctctatctctactattaaaaaaattgaagatgtttccaccagaattttagtacgtcatccatatttgagttgattatacgtcgtcattatcaaattcaacctgattctagaataactattatatactcctatcccaacctaacccctccccctccgccagcccaaactaaccgtcccacaccatcccgcacgcctccactgggcaccgtgcgcgcccctcccacgatcgacatcttttttttgtcgtcttccctttttttgttttctttttctccctttctttactcacggtaatcctgatcctctccatttccttccaatctcctatcttttctcctcctttttctctcctcataaatatttttatgcggcaagtttgttacttcgcaaatgctttccatctatagtaaaaaaacattttacaaattgaataatcaaatttcaatttttggtccatgaggtatatatatatatatatatatatatatatatatatatatatatatatatatatatatatatatatcaagctatatatatggaacttttgtaagcaatgaagaggcaagaagatcaaaagaaaatggttaaatatataccggcatatttgttttagtgttttctctcgtttcctgtgatttctccgataaaatctgtgaatcatgataagtaggatttttcaaaataaaaaggatattttgcgatgataatgctgcaaaaataatctctggaggatttcaaacaaagagcacatcattttaagtacatgaattatgctattcttctatataaattggagcagtcgtaagtaaactagataggtatcctgctcgttcccacgagaaaatttaagcgataaaatagtatatatgagttagaattttcttacttacatatatacctatacgattttctttcatgtgcttatatattttgcatcttgatcaattatccaaatgttataaatgattggattgtatggtgtggtttttggaagaagcgatgaactttacacccttgatgattaatctaaagagaaataattgaaatgatgtgacttcattgtagaaaagagaattaagaattacctgaaacataggatttagtgagaatgaaccttatagatacataggattaactaaacacatcagctagaaaccaacgtgaaacttattatgataatagtgagttgctaacataaaaccttttagaagaaaacaaacaagagaaagatcgatgatggtataatggttttcgttaaaaaaaagagagaagagtataagagtataacacgaacttcaggagattgaaggtaaatatatatacccaattttctttaccctgtcaacgtgagg

SEQ ID NO: 51550 - DNA, 657 bp, Oryza sativa
agtgcacgtaggagccttttattcccctcgttccgaccaccaacttctgctgcaatacatgagcttgttggctcaactgcgaaggagctcgtccaggaggcctagccctgtagatccttacctcccaatccgccgccacagagctaaatctaaagaactgtggtctcacgtggtactgcagcctagagaccctgaagcacgaggcgttctggcccgttttatcggagatgttgtccatatacgagcatgtcctcatttacaacaaagtttcgtgcatggattggcatgataccacatatgtatcatattggtatatgtagtaccaccctggtgtcacacatgtaccacttggtatagaaaaatgctatgcgtacgatgttgctgtacgatttcaatacgatcaaacaccacaccatccctgtggaagtgaaaccaattttcatgtggaaccaaaacgtaacactgtcagtaacgctaggagagaatcttttgatcgtacaagtatagtaaacataagactgtacgtataacgttgctccttggtatatataattatgttcggtatcgtattaaatctactcctatttgtaccttactccatctaagaattggattcagcacacctattctatattacaaaaaatttcaaattactag

SEQ ID NO: 51551 - DNA, 562 bp, Oryza sativa
gggctacaacactcgaaggggacatacgtgcacacgaccggtgccggacatgaccacactggcgtgctcgtggcgcgaaaggcactgtgtacgggcgaacaagccacaccggaccacacatagcgcccgcatgtataagctagtaactacccaccatgattctcaacatgcatatgtgtaacacctgcagatagatatgctagctctattaatacaatcaaacagactcttgtatatatgtgaggaccatattggaaacatgcatatctgaaaaagctgacatcatccacatcctataagtagtgagcccatagaaggcctaaaactataataatcatacatctatgagggcggagaggctaatgtatatgaatataagaaattagaccgacttatgcatgaacatccctttgtcttctcttatacagaatcgcatgcctcgactaccgacataattactccccctgacactggggattatcaaagtactacctcacatttataatgaaggcaaaatttgatacgagacacccaaaaatcgtgtaattggctgtgagacacc

SEQ ID NO: 51552 - DNA, 916 bp, Oryza sativa
tttttttaactgacaaaatcatataaaaactcaataattagatagaggtcacatgatctaatttttaatttttaaataacaaaatatgggtcatatagatcttgaatttggtatttaattgataaataacaaacagttgaaaaaaataagaaaaaaatgtaacttgacaattgtgtagatttagataaccgattattatcatttttatatattaagtgttagctataaaataaaagaagttagctaaaaaataggagaataggggagagttcggagggtgtggaggggagtacttgtacgtgcgtgcgtacggtggtggggataccggatttttttcttttagatggagatttaattggcaaaattagtgggtccacctttttttttctaatttattagaacgccatgtggcggcttatgaaagtttgtaggaggccacatgacagcttgggagcgtttgtagatggttaatggatttttagtatataatagatagataatagatatagccaggcatatcttaactgaagttgcaactgaaaatcttactttatagtctaatttttaagaattattcgaatcaaactataacaacctgtttgtgccataattcaccttagagttagtttattttgggcaggacaaattatttagagtgtcgccttcatttcctggatatttgtgtttagccatttaatctggcagatttaccgtgcagtctcaacagcaaactactatacttgctcactgatgatcatgaaagctcagacatcaatgaatacatcacgatactgtgatggtgtatggaaatatcacggtataccattaaccaagatggcatgaaattatccttcgtttttttaataactaaccaagaagacaagaatattctgaccacactggacagccacgtagg

SEQ ID NO: 51553 - DNA, 1261 bp, Oryza sativa
agtttagaacttttgggtttgatatttacacacacattatttctaaaaaatgaataaaataaagtggataaaataggtattacccgctcatacccaattcttaaatcggtaaattcttcttacccataccctctccaaatattatgggtatgagtatgggtaaggttaatagatacctatagtggtagccctacctgaaagcgcagctaatttgtatacatgccaatgagtccaaagttccaaacgaattgcggccctctacatttccatttggaacctccaaattgcatgcatcgattcttcatcgcacaaaacacatgaatgacccccgatgaccgtcctgccatgatctgccacctagtgtggaagggcacgagcatatcatgcctatcagtcctttttgtctgtggcagagcacgaatgttggaggcactccaagcaaacaagacaccccaacattgtcgctagccagtgcatccaatcatccatggtccaggcagtaggcagctagtcaacctggttgtggaggagaccatggtatccacctcatcaacttcgccatcgagcaaaggagtaagaatataggattgataattgcgctgcataatcttggttcccagtgcctcctaaccctacacatgtaccacaggttcacttaaaaaccggctctcttgtctaagtgtattatggaaattgaatgcaatggattgccaaaatatgtgaagacctgaactatatatattcattgtaataaagattattatttgatatgatttgggatgcaagttcagaaacatggatataaattaatatgtattgaactacatgatatatatgcaatttatcagcggtggagccagggcccggcgaccctgggcagctgcccgggctccgccggctgcatgcaaccatacccccattagattaaacataattaccttgctaatcatctttctaatcatcttatgaattgaagcaaaaatcgtagtttaaaggctattgacaacacataaagtgccggaaggctggtttgatgtttttttcttgattagtatttctttgattttactattgatatattttttgatttatctttttctccatagtatatgacgtaggtaattaagttttttttttcagaaagtgcgatgatcgtacgaactatactatgcgtacgtacgttattcttttttggatggagattagcagcgtgggagttttaatagatctaatcgaacggtttaaaataacgggtccacca

SEQ ID NO: 51554 - DNA, 7618 bp, Oryza sativa
aaacaaaatactgtatttattttattttgtgttctagtaaaacatttaatatgttcttcaaagatttgagattgcgagcaataaatagaagtttgcccaataagcacaaactgacaatccgttgccccgctgcctccatcatcctttaggcctttttgggtttagaggggattgaagagaattggaagggattgagggagaataattccacaccacaataggaattaaccaaacaaagccttaggggttgttcgtttaagcaccaagagagagaggggttagaggggactgagggagaataattccacactccaatagatgtgggatagcctccatcggtgttagtagtttcttttgttaaaaaaaatagtaatttgctttacctgtctatgaaagaaagcctagaacaggaacaaagtcttctacaagaaaggaaaacgacaacgattctacagagaactactgacaacgaaacagaagctaccatggttttccagcaccagtacagagcttcgcaacattccgaacaaaaagataagcggcgtacttcattccataactttcttttctttttttgccaaaacaaaaactgcacatgaaccgccgcaccctgaccgcatagacatggttgctgtgctctgcaattccgagcaccattccgtgatccatggccttctgactttgcagagaaagatttacaaacaaggaagagcatcgtacgtctttgttcccgaatgcatcctaaccctaacgcgcaatggtgatcaggttgatttgtgcctgaagttagatgattatcattgcacttagaaactgaattaattagctgaatataagacgaactggtggcaaggcgttgtgcgtgtgtggatggataaatggacgcaatggccttttatacgtactccctccgttccaaaaaacaaatcatggggttccgtgtccaacatttaaccgtccgtcttatttgaaaaagatataaaaaaattaaaaagataggtcacgcataaagtattaatcatgttttatcatctaacaacaatgaaaatactaattataaaaaaatttcatataagacagacagtcaaacgttaaacacgaaaacctagggtttgtcttttttttttcacacggagagagtactcggtatatgctaccacagtcatgacaacatgttgcaattaagtcattggtgcagagaggggttaactccaagcttccgataagtattttctttggataaatgtgtggtatcttttcaaagggataaggacggcaaaatggtcaaaataatggagaaattggtaaatggcaggaattagtacgttcatgcaccatggagcaattatacggtaataaggtgaagccaaaaatgtcggtggtatagaactaaacatcctgtactttttacggtatctattgaaccgtatttttttaattccaatgaactaacatgacttgcaagcaaaaaccatttaacctttgaggttttcttccatatttgaagaggtatatacctactcacaatttcagatttaaacaattaaactggttaaacttattaggaaacaagtttctgacattactaaagctccgttcgttacctccctttcccaacctctctccctcgttttccgcacgcatgtttttttaaactgctaaacggtactttttttgcaaaaagtttctatacgaaagttgcttaaaaaatcatattaatcaatttttgaaaaaaaagcaaatacttaattaatcctataataataggtgctttgttttgcgtgccctcccgaacacagccttaaaaaaggcacatagaggtcagcgttgtacgcgcgagaagtgataaaaccaacacctataatccatttcccacctctgcagattaaaaacacaaaaaagaagcatctttaagagactataagtgccggttctataagaaaaccgacacctataataccttttttcttaaaaataacaagcacatttaatttatcatagatgacagttatttaaaaaccgatacctataatattgtgtaggtgtcaacactacactaaaaaaaggagtcgagccgaccggtggtctcgagtggataaggctgagagggctcaatcctctctctctatctctcgttctctctctcgtaagttctctctctatctctacctagtggcggcggcagtggcagctctgttccctctagtgggaagggaggcgatgggtggcgccaggaccctccccatcaggagtaggtggcaggtggcagcgcccgaggggaggaggcggcagcgtggcagtggtgtcgagcggcggtggtgtcgaccagaggctctttatgttaattatctatctgttcttgatgtgtattttgtgattgtattcttatggctgggaagaatgttcttgatgttcttccatgcattcggggcgaggtgaaggggagttgctcgatgtattggcttgatcgagccgatgaatcgagccgcctttttttttattctaaggtgctggttttgcaactgatacttttggttttcctcatatgtgccggttctaggtgccggttgagaaatccggcacctatccagggttccgtgatagtttgattagcaggggcaagactttttctctcgttgcaaggtatagagaggtatatataactctccgtgttaatccagagtatatacctctagcaaggtatatacattataattggcacatatatgtataactctaaaaaatataagaaaatgtgacaagtatttataaagattaattttgataccacgttttatggtgggtaaaaggagatgtatatatatcatgtatggagagatacatattcctctccaccaagcatgagagaaaatctcttaagcctttttacctcttcaacatttttttactacaggatagcatatcagtcccctacactccagccattttattcagactactgcaatacgtccacgtacactagtggagaaacgatttttactcccggttggaaaccccctaaaatataatcctagttttccaaccgggagtaagaatccagggctaaaaatcgctatctttagtcccggttcaaatactcgggactaaatataccaatcgggattaaagatgtggtcccagttggagggtttttttcttctctctttctttttcactgttcttttgctatttgcccaaatcatctcatatcaaacattcacagcattatctcagatcaaacattcacaacaaatcattcacagcacacagcaatataattcatccaaatcattcacagcaatagtttatcccaaatcgttcacacaatagttcatcacatatcgtatcaatcaacacagatcgaatcgcatattaagtaaaaaagataaaaaagataaaaaaaatacatggcagcgccggcctccaccgcctgccgccgcaccggcgccgcccagcagcctcccctccggatccgcctccgcctcaccgccgccgccgcccgactggccaccgcggcgcgaggccgccttcgcctccgcccggccgccgccgccgcccggccgctgacaatggggaatagaggggaggaacagaatggggagacgaggaggaggaagaggaagagatgggaggcggaagagataatgttagggaggaggagatagaatttatcaactcctcgattacactcacgcctcgtcctctccaccgcgcatgccgatcttttgttccggtttaggttaccaaccgggactagacatctatttctagtcccggttggtaatagggatctttttttccggttggtgtgttaccaattgggactagaaatagaactttaatcccggttgaaaatgccaaccgggactaaacataaaaaaaagtagctctaaccttttgaaccaggactaaagataatctttagtcccggttttttattgcaaccggaactatggttgaatttggctgaccgaccaaaaatggtttctccacaggtggtatcaaccgatccaatatataagccagaaagcaacacatccatcggaccttccaaattctgtttttcactttttttagaaatctacaaaactctacaatgtgtggtgagctcaatctgtgttagaagtgcgagccagagaaaaagaaatgtacttttcagatcaaagatcatcacaatatactgcagctttaacttataacaaagcttgcaagaaaaacatgataattcattgaatttgtcacatatgatcggtcgaatttgtcttgatgtcctttctcttgcttcaaatacgttgcaatatcaagtcatcacgaacaaaatctatatattatatactaaaaagtccatcaaactttctataaacgctcttaaatcgctacgtggcactcctacaaacacttctaagtcgctacatggcactatctaattttaccgttgattttcgcttaaattggtgacccgatattatagaccattagattagatctattattaaaaaataataacttcctcgtgtttataacaaacatagagttaatatataggttttgttttattattttactatacatctaagtcatctacgtatattcatgggtaaatataggaaataataatccatattactactgtccgtacgtgtacgtacgagttcgtacgatacaaatactattgctgttctttctgtacttacgaatatacatgaatgaaaacaaaacaataaacctttcctaatcttcgttggaagaaaaaaaacatacgcatgttcataaaaaagacggtaaaaacatacatccataaaaatcaacggtctttaaaatattttctataatatatatataaagataaaatatattacttcataaatataaatatatgtagttaaactaaaatctataataaatgtccaatcaatgttattttaaccatcttctaaatatactaaaattatattaaactttgtagaaacacttttacaccactacgtgctctcaaataaattagagaaatccgagaaatctattatatactaaaagtctattaaatatgctgcgaatactctagcattgtcacgtggcactctaataaaattagagaaatcctagaaatttagagtaaaaaaaataaaagcattcaaccttcaattttcacttaaattagttagtagacccgttattttaaacattgcattagacctcttaaaaatcccatgttgctaatctctatccagggaaaaaaaacatagcgtgcttatgttgtacgatcgtctccctcccaaaaagcacaaaacataaatacctacatcatatacgatcgaaaaaagataaagccaaaaaataaaaagaaaacatgcacacgtacatagtagaatcagaaagaaatactaatcaggaaaaatcatcagtgcggtcactgatttgttatcaatagcctttaatctacgattttattaaaaataatactacacatatgtgcaaagttaaacttaatcataaacttattgtagtgataaatatatcatgacgaatgacaccaacatgtaatagttaatgcgaaaataatgtttcaaataatttcatatcatattttatggtgtcaaatatcacttgacaaaatatacaacgttaatttgaacctacatatgtaaaaattaaaataacaaaacctagcattgttgtttaagtacatctgtttaggtttatttaattttgggagagactcgatcggattctcaaagtatttggaatttttcaaaacttttcttatttgaggtgtgggaagcacaattaatagatagttgagaaaaaataaattaaattttagccagtgataataaaacaacagaatttaaatttggtttttaagtggatatttttaggtatattttgggtgaaattgagattattaaagtatctgaattttttcaaaacttttttttctatttgaggagtgagaagcataaatgatagatagatgtgagaaataaataataaataagattttagacaattattttgctacaatacaacccttaattcatcacgtgaattatgtattttttttgccatgtagtattggcaaaacatgaataatccaataaaatacgcgtaaaactacttatgttttattttttatagatgatagaaattttaatatattgggtacaattgatggatgaatgttagacaccattgaaccgaactgtacgtgcactctagcgaattagttagtgtaaataagtttgtgaaaataagtacattcttagaatttgtaaatgagtctcgtatagttataaacaacatatggtggaaacaaatctgacgctaaagtataatctctatcaaaatataaataacgatatggtgttttgcagattttcatggcggtacgtctctttagctatagtttttgttagagtagtgtcgaatgattaaccctgctcatttgaaaaacataatatttatgtattccattaaaatttgagaagtacctattagtaactttatatacacattttttctattctctatcacaaatcgacccaaaacttaaaaaaaaaatgttttcatcacttcctcctttttttctatccctctttgtccttgaatgcaaggcacagtacttgctatgccatcgtaaatattgcatggggtatgtacatggttgagttaaggtgttatccgtgaaaggccgccataggcaatgtaactaaagtaacatacttacaaatataatcatttgtgagtgtacggatagtgaactaagtgttaaaattgtactctaggatggttttttggggcatggctacatcaatgtgggacctatatgtttcaaggcattatatatatacaaaagcattggttagcagatacagtcgactttatatagactttatccgttagagaggcattcgtgtttatttttaacggtatatttagactatttatacatagaagtgaaaataactgatgaacaccgggttatacagtgtagatgaatttttttagtgtattaataatgtatcatttattttagtggtactaatacagtttcatttattaagagtgcacctaactcttaaaacaacgatagtaagtagtgatgaaaaacaactagtttatatatgactaggacaaagggatttttatttaaatatgagagacattcttattacattagtggtatattaaaatctaccgtctatcttacggtaaatatatttctttttttattgtaggataatctaaattcccttgtagtgtatatatatatatatatatatatatatatatatatgataatggaatataatcccagcctttactcaaatagctacagccaattattacaccaactcaacaaaaactcacacctaaataaacaaaagcacagacaatctaataaaaactcacacagcataaaaagatcacaaaaattattaaattctatttgtgaatctccatccaaagttagcgaacagctgcataaccaatgactcaagattacgacatgcagctttcactgacttgatttcttcatcacactttagtagctgagcctagaactggagccagtatgtggccctaaaaagaacctgcatataggacatagatggtg

SEQ ID NO: 51555 - DNA, 2743 bp, Oryza sativa
ataacaaataagatgcccgtgcatctgtgcaaaattcatttccgatttatattcccaaaatgttctccggtttatattatatcgttatagtgtttgaaacacaacctataatacatgcccgcacgaatgtgcgggcttcgtaccttcctagttaatcttaattagctaatcaagtcaactagcgatcgcattggcattagaaaagcttgtcttctcggcaatcatgctgttcgaactcgacaccgtgatggtggctaaggcgacgtcggcgagtagtgccgcatggggaaggccgtgttccggtcggcgccgtccctactatattgacgtaatcagtcgttgattttctattgaaaaaccattataagtaagtcgtaaatcgaatataatttcatgggttatacatggcattaaaggatgagtgttcttggttatacatggcattgaaggataagtgttcttgggatttcatatttcattgttcgattaattagatcaatagaagtttgataaaaaaaaaacaatctgccaagagtactcatccacatactaatataaatttttaaccaggttttatggattttgatcaactagcaatcactttgtattgtataaactctatgtacgccattctctatatttaaacgatggcaacgatgattcggtattggaatgattacttcattattgatatatatgtgtgtgtgtgtgtgtgtgaactttctgcaatgctgaataactttgttaagattaccaatattagaccaaggttcaaaattctgtaacgaaatttccaaaatttcggaagtttcggttctgtcggacaaccctatgatattatttcggtcgaaattttaatttatttttatttttttgtaaatttgataacattttgttcaaatctttttttaccaaatcttgttcaaaatttccgaaatttcagtacatcggcaccctccgatataaacgctgaaagagaaatattgaaccctgtattagactacattaattagcatcctgggttatctataaaatgactttgatttctgacacaccctttctttttcagtggtaataacattgctgaagacaatgatgatccaggtacatctgcttaagttggcttcattgattggggtacatctgcttaagttgggctgagcagtgccttataaaaggaaacttaccattgccatcattatggtgaatgtcatctggtgcgtagtatgctatgccatctattccatttcccgtggtttacacacagcattggcatgtgccaggacaaggtactgtactgctcctactatatctttgatccatattgactctttttcttgatttgttgattgctaattgaagctttattatgctgctgtggtgttgcctgtcaaaattatagtataatttagggtctggatctacattttagtgatttcaacatgcatatttgcttataaaaagatagtatatttaaaataaggaatttaataattggtgaaatcactggtaatttcgtgtcctttgtattttgtttacatgtcaggattttgccaatttcgaatcctttgctaggttcttggatgaggactaaaccatgtttttagaaacacaacattgttccaactgcatataatgctacactttttggcagtttaaaaacaatagggcaatcattattcatgcatttttgaaacaacatggcagtacaggatgccggttgacaatcattggatagatgatgtttggcatgacctatcaatgggggttcttaactgaatattttgggatttgacgctgcttgctggaaggggtgacactgtcactcaccaaaggaactcatggcgatggtcagaattaggcatctacaattctacatggcaaagccagcatacatggcaaggtattgatctgatcagatttgatgcaacctgtttggaagtcaggcccctttgactttgaggtgcaaattaatcttttgcttgtctcctagcttagaatcgcatatggactgttgctgtttataacttagaggctggccatacaattacttttgtcccctacgaatcaaaccttgagacatctcatcatttgttcatgaagagtagattagtttaagccatccagataggaataagcctgtgcttaactgaagtttcttcagcaagccctccttcggcctgttcagtattggaatggtggtgtcacaagacttcatcagaaaagattcaaagaaaaaggctcaggaccctcttcttgctggtctgctggggaatttggacggaacaaaataatagaaacttcgagaaagagggatggtcaattcaacgaattgtcgacaaattctttttgacgagatcaagcagtggaccagctacagagcaaaagggctggtacagttgtttttttgttagattgtaattttatatagcctctggcttttgttctattttattccctcctatcaaaattcgtacaaaagacagtcatacccatgtttacaagtaccgataatgttggttatacttttttttacaattacacaggagatatattttataaattttggttgaataaattatttttgatagatatagtttccaaactttcaatgtactcctacgatatattttatgaaaaacgtgcattgcacgtgcacgattactagttagtaaactagtacacgagactgtatgtcttcccctacagggattcctatttactgcaatggaaaaaatgctgg

SEQ ID NO: 51556 - DNA, 3000 bp, Oryza sativa
attcctgcagcccgatcatagataatagtttacctcaattaatcataaatgaattttcacatacggattgcttaagtaaccacataggtactaatgaattactgcagatggttctcttaatgaacctccttcaagaatttttttttaaaaaaaacataattcaagagaaaaaaacttttacacaaatgaagttagatgcacataaattttatacgaaatttattgctctcagtgagatctaaaatttttttagttgatagcgcttttttccatttgacattttcatattccctaatatttgttacaagctattagaacgaaataaattttagagttttttgaaaccacctcagatggagacgtgctctccatcaaaattgtagaggtcaacgggataagtttatgtcttttcattagatgccatctgtagtgccaaatatggagcataattttttgaaaggttaagtcaaaataatagcatacaatcacatcgtggttgtcggtagttatatccaactatatacggtaggacgtaacatactagtagtacgtgataaagagagcagattcccgatatggaatctgtgcctatatataaatcgcttatttttggctgtgtttagtttcacgctaaaattaaaagtttaaagaaattggagcgatatagtgaaaaaattgaaagtttgtgtatgtagaaatgttcgatgttatgaaaaagttgaaagtttgaagaaaaaacttttaaatcacgcgtgggtacggtgactgaatgcctgtacgttcgtagggtatggttataggttaccacccgtacgtggtaaaaatggtttacctagctagctaacagtacgaatgcatgcatgcacggacgtacatgaacatgtacatatattgcagtacatactttgggtgatggttggacgttgttgatgaagaagtcaccgaatatcgcagggtggaaagccggcgccatcttggcgtcgggagacggcgacgtcgcggtactactgcacatgcagcgcacggggcgcgcggcggcgtgggaggacgacggcggacgacgacgagcggcggcggctggcgccggagccgcagtagaaacgggcaccagcgagaggaaagccacgtggctcttcatcccgatcgatgataccattgtataccaattaagtgtagtcgttgagatatgtatctctattaataattgtaccaaggcaagtgctttaatacttccaaggcgcgcgcggcgccttttatatataggagctcaaaaccggccggttactaagtactccactactactaatcaagtgaaaggtaattcactaattaaactagttttagccaagtacgtggaattgaagacaagtttgttacagtaggagaattaagtacgtatctcctcagagaatatagttggttaagtcaagccagttagccagatcatatgctacccataattcccttagatcaatcgaccacgtggtaattaactgaatccacgagaggaatgaaattaatattcaaaacaaagacaagtccgggtgtaacggtacgcacgcttttcacggtttttaattatagacaccgttaatttttaaacatatatacgtttgatcattcgtacaaaaataattaattttaataaatttcattgtcatttgggtgctttaagcatgacttgaatttttatgtaattacacaattctttttagtaaaacaaataatcaagcgtatatccaaaatcccatgtgaaatcgtacattaaatatattgaaccagtcttaaaaaaaacaatatattgaacccggtgggagtagtatatacatattttctttgtacataaggaagaagaagtgcatgcactaggtatgcaaattctacaagctaatggtttacttaacttccaacgacttttcatagcaaaaaagcttctaccgtgcagtagcgcactatccatccatccagtcaaaaaaatttcaactttggctgttgacatttaccatggaatatacaggcagtcaaaaggcgtgacagacctccgattgtcgtaaaaacaaaggatggatgagtcctactcctatactcctacgagtctccgataacacacgacaatttttatactagcagatactcccacatgtgctgctagcaggccggcgcagctgcgccagctaattaactcgtgcatcctatcatcgtaaagatactaccattagtactgacgtgtagaataactcgtcggtaccatgcgttttgtcgtgggatatattgattaatgatgttatatattttagaaatgatatatatatatatatgcatgttcaaataatgtaaaaaatggtatatagataatgattcgacattgcttgtatattaaattctaaaaatacaacaaaattataaatggtacgtcatttttgcatgatatttaaaatactttagataataattgctagtgggtgatgatgtggcatacttacatgttaaacttaagtagttagcgtgcatcaactttatagtcttttaattcaaattttaaatcttttaactgcaaaattcgaaaatttcagctctaaatttaaaattttaattttaggtacaaatacagtaaaagaaaagtcatagttggtaccaattataacttgtatgtaacttccgtaattttgaatcgttagatttattacaagatttgtgcatgtgtgataggatttgttctcacgacctccattttacccaaataacatgttatggagatatttttgaaagttacatcaagttaaattatagttacagtgtaattacatgtaagttacattgtaattacactacgattttactttaattacatatgtcatttttttgggaaaacaattgtggacaaaaattattgtcgaaagataactgcgtcacgtcaaaacatgtggttcactcggtgagttgatggcatagtgaaagcaatatattaattgataataaatttttaggggctgcaggaat

SEQ ID NO: 51557 - DNA, 1950 bp, Oryza sativa
tcccccattacatggcaatatggggctatttatagtcttcgtacagactcataccctctagggtttagttagtacagggaaatttatacggatacccttatgatagaggcattagtgaggatacatgttgtcttttgtatttatgggcaatcaggcgatcttcttgggctggcccattaatggcgaaaggcatccatggcctgcagtgcctcccaagtcctcagtcgaagacacctcctacccgggtgaaggcctcctgcttcgctctatggtcttcacccatagtgatggcttggccagatggtgagcttggtggcgaaccattcagttttcatcgttcggcttcgcctaggcgcttcgccccaggcgcaccccttggacttagttaacgccttatggtttcggtggtttcggtaggtcaggtcgaaggtcctcgtggcatgcctccagcaagctcctcactggcaagggtgagtagggagcttcgtccgaccaacattttcgtcagctttgatgggtgatatcatcttcatgttggtcatttcatctccatgccgactgcgtcagctaccatcaatggacaattgtgactacaacagaaggataagctaaatgcttaggggctcatcaacacaagcgcgaggattatatcttcaatttggacttgttccggatacattcaacatgaattcatggtcacgagtcgatttcccgtgctcaacgactggaccactcattattccctatgagggctatctgccgagtatttgagccagtcaggattaaattatcacatcctctttagtacatatcatgagggatagctacttggatcaggagctattcagatgagatgcagttgatctatatcattcgggagatttgttacttgggaccatattaattggcatactctacacgtctaattttaagggtatcggtaggcatattttcgttctaggcctaatatgtctgcagcccatattttcaggtgtggcctatcacgcttttttagggactttggcatcatttttcttaggcaaaagtgcgcgtgatcaagtgcctaataccttaaaatccttttgtacctcagttactcaactttttaggagttggtacaatgcattttaaaatgtgccgaacaatgaagctttatatagttgccccactgaattattatatagtcaaggcattgtttggttttataaagcaattgattggatacaatgttgtcacgcccggaatttctatccaaaattccaaacgcttacatgtgtgtgaaccctcgtccaggaatcagccgaggcacacaataacaaattgataatagagtacaattattactctaattaataagcgaataaaatgtcattacagaggtagatagttcctctcaatcaatgaagatctaagcagcggaaaataagataaacggcgcagacggctccactccacaggcagcttgaccaaggctacacctaatcctccacaccatcaacttcactgtagaactcttcctctgatgaatgattgcaaggtgagtatatgacatactcagcaagccacgcagcaaatatgcaagtgcacaggataacaaagaatggcatagtagggtttcatttgcaaaagcagcatttagcaaacatttgagaatttaataaaactgttaagtaattaaacaatattaatccaacgctatacaacataccctgttgcatagggcccaaccattgtgaacaaccattcccggctgcacagttctatctccaaaccaggaatataccattccaaaccagaagctaatcaaattattaccagttaaagcatcatttactatggtagaagggtgagcctattcacgaaagccattgttcgacccgcccataccggcgggcacggctattcgaataggcttactctgatcagaggtgtaccactgtacccacaaga

SEQ ID NO: 51558 - DNA, 715 bp, Oryza sativa
tttaattaccagctcctcctcttgacgacagcagcaaaggtgtggccgaggcggcgaggcacatagataggggcgggcaagcttggcttggatcgatcttgagtggatagatcaactggaagggcgtagcggcaacggcgttgggcgggacctaagatctgacatgtgtacgtggcgaagggcaaaagtacacggcattggaatggatgacatattatcaaatttctcgcaaatgatcgagcaacctaagagacaaagtcaatcgaattgaaatggtccgcgtatagtggaagtgggattgcactatactcgtattaggtagatgcacggacggacgtaatacaaacgctagttgacagttccaattaatcgttcatgcgacccaattgatttagttctaaactttcgctccatactacaaccttctcatttttctattatcacgttttcttaaccgctaaacggtggattttatataaaagaaaaagaaatactccatcattttacgttataagatatttttgactttggtcaaagtcaaattgtttcaattttaaccaagtttatagaaaaaaatagtaatattttcgacccaaaataaatttattataaaaatacatttaattattaatttaataaaattaatttggtaatataaatattattataattgtttataaacttagctaaatttaaaatagtttgactttgacca

SEQ ID NO: 51559 - DNA, 1175 bp, Oryza sativa
cactggtactaaaatttgatcagtctatagtaggttttaggcttgtgaaataattgtaaaattagctttatgcaaaagaacctgaagccattccttgaaataccctctatcatatgcattgttgttgtggtggcttcctgagtacggttggtactcacccttgctattcatatatcttttaggagagtgttgaagagaagcccttgtcggtacgcttgcgtatctaacaagatgatcggagtgcggtcttgttctaggtctcgttccccagtcgactgcctgtggcatgttaaccgggcccttatattattttgtcttccgctgttgttctctgatagttttggcctacctggccctaatgtaagtatttaactcttttagcctaaattcattcgtgatatgttgtgatccaactatgaatgtgtgtaccaactactgatccagggattgatacggataaacacagaaaatttccgattcccaaaattgggggtctacactacgttaacggcgcggttagtcaacgtgcttgacaccgacgtcgtctaagctatccaccctaacatcctatgtgccgttcctatcctaaccacctcgttaaaaaccagttgtggaccctcagatcttcgacatttcaccgaaacaaccgctgcttcgtggcctatggtaagtggtttctagaaaaatctttggggttccacctttcccaattcagtctctctagggtgaggcccgtgattctgcagccgtaaaaaaaaacctagctcgattccatgcccggaaggcaaagttatcaaggtcttaaattcgcccagaaatctccatcggcagtccacggtgtcgcgcccgccagcctaccttaacggcgcggttagtcgacgtgcttgacaccgacgttgtctaagctatccaccctaacatcctatgtgccgttcctatcctaaccacctcgttgaaaaccagttgtggaccctcagatcttcgacattccgccgaaacaaccgctgcttcgtggcatatggtaagtggtttttagaaaaatctctgggtccacctttcccaattcagtctctataaggtgaggccggtgattctgcagctgaaaaaaaactacctcgattccatgcccggaaggcaaaattatcatggtcttaaattcgccaaaaaatctctat

SEQ ID NO: 51560 - DNA, 1291 bp, Oryza sativa
gaccacaccggaaagcaactcaatcactgcacctaacaacacatttggtgcacccaaagcaacatgtatcattataaagtgcttttaacgtaaatatcgtactccctccatttcacaatgtaagtcattttagcatttttcacaattatattgatagtatctatatagatttattaacatcaatataattgtggaaaatgctagaatgacttacattgtgaaacggagggagtagtaagtagaggaactaaaaatgtatgtaaacaataaaaatgagtcaaaccaagtaataactccacttaaggtgattctaatattgaaatcgtctcaggtacaactctgtcataattttatcataatttaggctatttactaacaacctaaacatatatatatctattaaattcatccctactaaatgttaatgctaattctctcttctctcgtaaagccatatcatctcaattgattttgtctttgaatgattcattaggggtacaaattacacccttttctccccaaaagcctcctcatacaacacactcatttgtatcctttggataatttatcaaggtacaacatatataagcacataaaagaaaaaaatgtataataataaagtaagaaataaaattttacaactcatatatactattttattagaaaaatcatacaatatttgaaaaagtaccttgaggtatatatctaaactttacgctaaaatttttgctaacttaggtaattagtacctgaaggtaccaaactttacactggaaaatatggtacctccagatatccttttaaggatgataaaattatatattttattacacaattctcccgtagtaatgcgcgggtatccatctagtttacttaacaaaagaatatttccacatcttgggtggaaatcattagaagacggcatatgtcacaacccaaactgttaagtacagtaattaaccattaatccttcctatgtaagttaattaagccttgataatcctaatgattaaatatgtttatcagaccttaatccaattatcgtagctcctaattacaatatttaaccgttaatctggttttaagtatagtgattaagtgctatatatgcacgtgctaacgctacggcggtaattgatggcttgttatgttggcttaacgaaataaataattgaaactgaactcttacaagggaaatacgcttgtaatagtacgtctgtttgtgtcacagtaccattactaagaaaaccggattggtgccggttgggaagcccacttaatgccggatttg

SEQ ID NO: 51561 - DNA, 598 bp, Oryza sativa
gccgcctcacgccctcacagcggccgccgcgcgcacgtcctcgccctcgccgcggccgccgctgccaccagcccgccctcgccacggccgctgccgccgcgcacgccctcgccaccgcccgccctcgagtccccgattcacgcacgcacgagttggggcctgggaggactcagtccttatccattcccttaggggtacaaacgtaaattcatataacctttttttatttccttttgtattttttaacacaaaacgtgggacccaccaaacgactgttataagtgggggtagacggctggttcagattcaaaaagtgggggtaaaactgcaaactctaaaaagtgagggtaaaacagcaattggatttgaaagtgggggcctggatgcaattatccctttaatatattgatttcactccatcccgtccccaaaatcccaaatcaatcgtccccgaattatctccaaatcctcaaatcgatcatctcaaatacatcacaaaatctttaaaaaattacatcacaacttctacaaaattcatcacagattcacataatgcacaaatccaatacataacacacaaatctatatccgaatcaca

SEQ ID NO: 51562 - DNA, 657 bp, Oryza sativa
ccaaaataccactagcatatgtttaaaccctaaccacagatctaacaaccctatcacaaatcgattctctagtgcccacatgctatcccttatcagcagtgggtatggctgctaaacaatctccaattgcgggagcgttgacggtaagatttccgcataaaggatggcgggtgcggcagctaccatgggcgttctgatggtatccacatgctccacatggatcgtgacggcgaaacctgccattgctaccaatggaggggatgggcaccagcatgactggaacgttcattcatcgtgtatatgatccgtcatcaccagctccatccgctactgaggatgcgctcggcgaagacagatccagtggcacagagggagaacatttgcagggtggcaccgatcaccaatgctaagtactgtggctgccggaggtcatgaacaacaaccacaatgttccatcggcctttttattatgccctacattcgttcttaatatggatggatatttgaatacacaaagtgcaatcattacgaacacaagtaatgcataacaatttgatactttagatgtgaaatgttgattaaagctaaagcatcaaattgtgaagttgatatgagaaaagtcatgttgttgcccaaagcttgatatgtgaagggcat

SEQ ID NO: 51563 - DNA, 3159 bp, Oryza sativa
agggcttgcgcgcgggcggctgctacgagggcgtgaggcggccacgcgcggagcttcgacgcggcggcaagggcgtgcacggcggcggccgcagcgagggcgagggcgagcgcgagcgcgcggcggcggcggcggctgcgagggcgggcaggctcctcactggccctggcagcggctactgttgttgctcccgtggccgctggcttccacgctgactcgccgaggcgtcgtcgtcgtccgcctccgcttccacgcaggagttcaagctctccccgacctctgccctctcccctgccgcgagtacgccgccatcgagaggtccgtacggccacttccccacaccgcgcctcctcgtactacgcagccggcgacgaccccatcctgctcgacatcgatggcgacgacaacgcgtgcttgtgtccacttggttgcaacatttatgtcctccatctgcaccatgactcactttgtatttctcatgattgttaaatgctgatgctcaagttataactgatgaactgatgaactctgtttttcgtaactgatgagcttcttcgtcatgaaattcttcagtagcaactttccggacctatcgaaattttgttcaaattttggtcaaattttgtacttggctagtatttgttatttttttgttgaaaaacatcacaagggatgctcatatttgaattatttataacaatcatacaaactgaaatcacacggtagggacaaaaataaaaatgcaataaccaccaagaatataaatgtccttttgctctacaactaacaccgttaaaccgactattagaagtgggggtagccagcagtttcagattcaaaaagtgagggtaaaattgcaaaccctaaaaagtgagggtaaaacaacaattgggtttgaaagtgggggcatagatgcaattgtcactatattaaaacaatgaagaaaagaaaagaataaggaagcaaccatatcttgcctctgggactaaaaaggctctatctttagtacggttggtgttatcaaccggaactaaaaatggatttttactcccggttacttcacctggattcgtagtcccagttgaaaaactggaactatagggggttactatccgggagtaaaaaccatttctccaccagtgtttttagtgactgaataaccaatataaaaataaagtataataaaattattataagatattagaatcaaaatttaaaatttaatcatcgtagtcattcttatgaaattttgctatttttttctccaactattggttggatcgcgtgcatatgcgcaggtgcatatacgcaccttggtgtaaaaaatgccttggcgtttggatcctgtgtccactgtccacagatgagtactgtagatcggccacgtgaaggcaaggggatcgatgatggtgtcagactatcagtacaagtctagtactattagtattttgattagcgcctttggggaacattatcttgaattgagagctactagtaagcaaagtactatatattagggcaaataggcaaataatgcacatggcataatgcaaaagaaaattttgtccctttgatcgaaggggaaaaaatagtatggttatttaagcaagcttaatactgtagtcaaccactacctacaaatcatatataaccaatctaataacatatttattaatagttatttataaatgtatactataccactaatatttggtctaccttttacgcacacaatgtcttagaacatgtgttatagttggctataaattctcttcctcttatatttttatatgtgtttatagcgggtttatagtttgctattctatttgctctcaatgaactaaactggtagtacaactacctattcccaccagtattaaattagtaaagcaggaaaaaaacaatttaaatggtctcatctcacaacagtagcaccactgcaccaatacctcgacaccaagcgcgtaccggaaagaacctcaaacagtggacctagaagttagtaacaccattggtgcacccagaacaccaaaagcacctaattaactacttaacaaaagaaaaaagaattccatcgcactagctacagttcaattttatgtcaactccgtttaaactttgtctcctttactatcttctctctccctaaaccgtcttaaaaaagtctctctctccctgtgtcacccctcgcgcgggtgacttggggcaaaccctaaccgtcgccgccgcctgcactcccaccccctctatgccttgctgccgccggagaaccgtgcgaggagctgagatggcagtagggccaaaacgcggcgctgcactatctccgacacgagggagacagaacgacgtgcagcgagccggtagccacaggggacgctcgccggcaaggaagggcggggatctacatcgctgtggccggatcagggccgtaaggcgcgacaggcggcgacgcaaagagctgcggcgcgggcgagcggtgtgtcccaccggcagggcagagggtgagcagtggcgggcggtggcgcagagggctgtggcgcgagcggtggagtccaagtggcggggcagagggtgtgcggtagcaggaggcggcggggagggctgctacacgggcgacggcgcggcgagtgcaggtggcggggcacttggcgcgtggagtgtgtgaagcagccgaaggtcacggatccggcgtccctgcccgccacggagaagagccggcaacaacgggcgcccggtgcgactgtgcgagggatgacgccgcactcgtaatgtgtccagtgcagtgcatggtggagggtatcaataggtattagctagtaccaactggcaccgatggggtaccagatctggtactgacgagcgttagacctggtatgaatatgtatcaggattgatatcttctcttcatcccaaataaattaaatcgtgtacaaaagttggtatttttgatagaggaagtgtatattacattcgtatctcgtagggtaggtataagatcggacaccaatgtgtatcatattctgtgaactccaccatataccattgatacagataatgtttggttgctacttctatttgctaacagttcgaagagctaaaaatatgaaaattacactatctgtttccattctttaatttcagcagcagcatatgtactca

SEQ ID NO: 51564 - DNA, 2040 bp, Oryza sativa
ctatatagcaatctttgttttccaagtctacatgctatagttgttttagcttaatgttttacacctatatatttgtcctcaaaaaataaaaaatattatgttattagtgtaaaattggacttatccagatatgttatatttttatacatattttaaaaatgaaagctcacgttttatggtcagagttacagaaaatcacatgtgttatgaattgtaacacgtaaccacgggttttatagtctaaatgttttataaaaccaacacactctatgttttgtgaaacttttgaaccataatagatggggtcaggtggcactaatcgtaataccgggtttttatgcaattaaccacaaaacatcaggtattttgaaatttgctcaatatatttttaagacatccatggtcaaatttaatcttgaagacttttcaaaattaaatactctaataatccagatagaaaataaaattatacataactatacatacataacgcttggactatatttgcattagtcactagtggggtgtggtggtgagttatgcatggattaacctagtatatgtattgcactttccatagaaatttagtggctttagagatttactgttggtattcatctatatgagtatgtgttagatggtacatccatgtaatcggagaaaaaaaaattaagaaacgtatacgacgctgggttggggaatatcgtgtgatagggaaaaataagatttagacataaaggatgttggataacacgtgttaggggaaaatggatttagacataaaagatgctggatacagaagagaggagccaaatagccaatgtgcttgtctgcatgtgtgttgacagacgctttgtgtaatttggaaaaaaaaatatgtacacgacgacactgatctgactagataaaatcggtatcatttcgggttaggagggccgtaaatcggacgacaaccatgggtgtggctgatcggcgaccagccgcgcgggcctgcacccgcgcggtcagtcctgcctgtcagtccattagtacaacaactactgctacaatactactaatactaatactactatcactacattattatttctacctgtaatactagtactattataattgtttttatatgtatatatacacatatacaaagtttatatatgatgtatacaaaatttatatacatgtatacaaactttgtatacgtgtatttttggtttttttatatacgtgtatgtataaaaataaaaaaatacacacatatataaactttgtatacgtgtatacaaagtttgtatatattatatatgcatatacaaaagttttaggtttttatttacgtgtatgtataaaaataaaaaaaatatacatatataaactttgtatacacgtatacaaagtttgtatatacccgtatacaaactttatatagacgtatataaagtttgtataggtgtatacaaagtttgtaaacgtatgtataaaacaaaaataactgaaaaagatacgaaaagaaaaaaacagaaaaaacaaaaaaaaagaaagaaaaaaacagaaaaaagaaaaaagaaaccgtccaaaaaaaattgggccaattccctacatgcccatgtaatttcacccagtcccttctacgcccctgaaatttgtttgatctcttatatacccctgagtttttattccgatcccttatatacccattccgttagttgaccattaatttgaccgttagtaattgtagaaattaatttattgtccttggtatattgttaaaagctagaaatgttttatgtgtaaattatttgtgatgtgaaaatcaataaggaataaattactaaatatttgttatgaatttttaaaaataaaacattatttcattaaaataaaaaagatttattgtaaaaaaagttctgcataaaatttgaaaattacttttcaacaaatatttagtgaaaaaagattcgttgtgaaaaaacaaagggggtgtaattagtttatcacaaattagaaaacaaattaaaaaattttaaataaatttcagat

SEQ ID NO: 51565 - DNA, 1603 bp, Oryza sativa
acatcaaatcatcaacggcagagatccgactgttttcacaaaaaaacatgcgacacagatatagctcatccgaaaaaaagaaaagagcagcaaatccacgcatgaatcatgtcctttttttttaacagcaaaaacgcatgatgctcgtacttgacatgcggcttgcctttgttcccgcgcgttggttcgcacgctagaactgatatactctctctcaaaatactacacacacagagactttagatttgtttggtagacttttaatttctaaatttaactttagaagttaggtttaaagtggagttacaaaacagattaaacctagcttcatctctctagtttattttgtgagagctttccacacagctttatttttattttcggtggagctaaaactatttggttgggtttcagctgaagctaaaccggtgtgaaacatgctctttacaagtgcttcgaatcatcagggttgtgcggaggtgctcgattccgctttgcatgacacactgatgccatctccatccatggcctcctgcagaacgaaccgcacgcgcacggccggcaccctcatcttccggcccattttggcgtgttttccctttgcattctgagcgtttccttcgcctccccgtgcctctcaattcaaaacttcttttttatcgattgctcagattgattctgttccccaaagctagcgcttatcaaaatcgaatgggactgacaccatcatccacttgcccgtcacgtgaacgatctgaagtactactcatccatacacgctgatcgctaattaaacaggaccaaagcgagcactttttgccttaaaccccgtagaacacaccgccgtcacatgaacccaaccggacattgcctccaaacccctggaataataatacccgaccatacggctatcccgttctccacagtttagtttttgttaccacgttattcaaactgttaaacggtattgtcgatacgaaaacattttatatagaaacttttctaaatactaaatgaacttactttttaaatttaaaataaataaaacttaattaatcatgtgctaataactttttttttcattttaagtattactacgcacttaatttttgtccgctggattctcgaatgcggtcaaagtgcaacgacgacgtgaccacccgaggtcagatatttattagctgcagcgatcgaactcgccgtctcacctgcgacgcagtcaaatcgatcgccattgctgcagcttggcagcttctgtagatagatattacacgttgccaatgacgaagaagaagcttcaggtcgtcaggcccagagcggtgtcgccgctcccggcgctcgccgccgccgccgccgtcgccgtcgtcctcctcctcctcacggcggcgggacgcccttctttcctcggaagatacgaggctatcaccatcagcggcgtcgcgtcgctgccgttcggttactcctcggagagcgcgcggcgcgcaccaccggccgtcgccgtggcgcgggtgccgagcgactgcgacatcttccgcggcgagtgggtgcccgacgacggcggcggcgcggcgccgtactacacgaacgagagctgcccgttgat

SEQ ID NO: 51566 - DNA, 2626 bp, Oryza sativa
ttgttaggaaccctcttctcccaattagtaacaacaagcttgaatacaactctcacaagtattttgggggaaaagagagaagcaaactagctagctgatacaagtgtctagaagtttctggaaaggagagagagaagctggaggtagaagaggatgggaagagatcgccaagattccagcccggaaccaggacgccgccgccgccgtggccgaagccgccaatgcctgatctgtttcgatgcctcgccatggttgttgctgctctgtatttgtatcctccctgtccaagcttccatgggccacaattgaatattagtgcaacatcagcccaagagcccatcaaggttaagaccctaacagcatagcatatcattgctgtccgtcgacgtggcggtgaagaaagagtgcgtggaggagatcgatcgacggtgagagggtgtcatcggcgggcggtcgggcgagcaggacgacaacgactgcggcagcatccgcaagaaagctcctgtattgatttgtatttgttcatcgatccgcacagcacggtcaacctggtacatgatcagtacatcacgtatgtctacatgttcttgttacattgtattgttttgtatttgttcatcttttgtcgattgaatacatgcgagtcactaaaccagcgctttgcttcttcgagcagaagcaaaaagtccctttagcaaaccaactgaagctcaggacgaggcaggggcaaactttttttttaaaaaaaattctctcttaacttttttcttgaaaattataaaataatatctctaatgtcctatagccaattacactctttttatagtgtctcggggcaatgacacaatcttatggtgtcccccagccaattacacaaaatttggatgttttatagcaaatttcgcctactccatccgtctcaaaatataagcatttttaacatagtatcaagtgaaatatttataactttgactattaatagcaaaaaaataaaaaaaacaatcatgtaaaattgatattactagatttatccttgaacaaactatcacaatatgtaactccttttatttaaaacattttacttttatagatatcattggtcaaggtagcatctcgatgactgtgtcagagtctaaaaatgcttatattttggaacggagggagtagatgttacaagcagtgtctcgggttctcctctttgtccttgtccttcaccaatgcctgtgccgcacaagggcccgaaacccacagggctagctgcagcctacgcaggccagttaaacagcataatttggtcggcatattgcttgtgtaagctgtcctttggcccaatggacaaataattgggacttttaagccttgtcctacaaaataggcaaattttgctacagaacatcgcaattgtgtgtatttagctcagggacactgtgaaagtgaacatttggaggaagacattccataatcgtggatatttacccatggacaccgcgtcgtctcctctccacttgacgtgctgacgtggcagatgggaggctgttttttggcccggtcggacacaaatacccctcagccttatctcctcatatccactcggtttggcaagcagtaccggcgaatctggcattgtagctggagggcggcggggatcgtcgttgtcggcgaggagctgaagtcggcgtggttcctatgccgtgattcaccgtgcagacgtggtgaggagggagctcgttggcggcgatgatatcttccgcttcttcattctcacgtgcttcttcctcttgggttcgccgtgattcacaggttagtgagttgcctcttgtgaaatgtcctttctgcaagggcgatttgacggtagtggagcggacatgcaagaaggaagagaacttcaaccgcaagttctatcgatgccttacagggcagtatgttagttgttctttgcaatccccaatttttctagggtttgagttgaattcgagtttgatttgataagctgtgtgttattgttgtaatttcagacaagtgcgcaatgcaagtttttcatgtggcaaggggattatgctgtttggttggtgaaggaaggtttccttcatggatggacagaatgcagtgcgcagaggacagaaggtgatgccccagaattagtgaatgcttcattgaaaggagtacatgatggaattgagatgttaagatgtgagattaaggaggcaatgagtagaatttgtatgtttgggattgtagttgtgactgcttttgttatgtatgttggcatgaatgtaatgaagtagaacaatgtgatgcagtaatgagatgaattgtgatgaatcaaaatttgtgcacttaaatatttgcaaggaaatatttgtgtttgcccaaaattgagatgaattgtaatgctggaaatatgtgtgtttgcccaaaattgagatgaattgcattgcaggaaatatttgtgttaacatttcagaatcatatggcatgaagtagcaatagaggaatggcatagataggacttgcattgcatttcagaaccatttcagcagtaggactttcatacatagaggaagtcttgtcttgcaacagaggaatagatacctaaagtcatggcttgcaaaatatacatcagtta

SEQ ID NO: 51567 - DNA, 824 bp, Oryza sativa
gttttgtttaaatttcaaattttagttatttgtaaattatatttttatacggactctaaactctcttttaattttattatatttattccaaattttagttagttttaaatttctatatggactctatactctacgtctaatattccttatttttaattccaaatttctattatttcttaattgtatttctatatggactctatactcttctttcaatattctttattttttaatttcgaattcagttatttataaattatatttctatatggattctagtctactcttccaatattccttattttttaattctgaatttctattatttcttaattgtatttctatatggactctatactcttcttctaatattatttattttttaatttcgaatttcagttatttataaattgtatttctatatggactctagtcttctcttccaatattccttatttttaattccgaacttcaactctttctaaattgtactattttcatatggactctagtcttctcttccaatattccttattttttaattccgaatttcaactctttctaaattgtatttatatatgaactctagtctcctcttctaatattccttattttttcaattccgaattttagctatttctaaattgtatttctatatgaactctgccttttctttttctccgattaatgtgagaatttctagatcatgagagcgaacgtggagactcatttttctattcctttaataatataatagattacatatgtaattttaaaacttacatatgtaattttcggatttacatatgtaattttgggactta

SEQ ID NO: 51568 - DNA, 659 bp, Oryza sativa
cgacacataggacgttccggtggatagcttagacgacgtcggtgtcaagcacgtcgactaaccgcgccattaaggtaggctggcgggcgcgacacagtggactgccgatggagattactgggcgaatttaagaccttgataactttgccttccgggcatggaatcgagctagctttttttgacggctgcagaatcacgggcctcaccctagagaggctggattgggagaggtgggcccccagaggtttttctagaaaccacttaccataggccacgaagcagcggttgtttcggcaaaatgtcgaagatctgagggtccacaactggttttcaacgaggtggttaggataggaatgacacataggacattatggtggatatatagcttagacgatgtcggtgtcaagcacgtcgcctgaccgcgccgttaaggtaggctggcgggcgcgacaccatggactgccgatggtgatttctgggtgaatttaagactttgataactttgccttccgggcatggaatcgagcttggtttattttgacggctacagaatcacgggcctcaccctagaaaaagtggattgggagaggtggaccccagagatttttctagaaaccacttacaataggtcacgaagcagcggttgggctgcaggaatt

SEQ ID NO: 51569 - DNA, 712 bp, Oryza sativa
ctattagtactagtacaaagaaaaactagatcggtactccgtgcgttgctgcgggagaattgtatgataatataagagatatgagttataaaattttctttattacctactatacgatttttatgtgtttatgcgtatatatatttttgtacctttatcaattatctaaaggttataaatgattgggttgtatggtgtgtctttgggggaagagatgcaatttctacccttgatggatcatccaaaaagatgaatctaaaaacaattgaggtgatatgattttatgagagaagagagaattaacattaactacacttaggctgtgtttagttccatactaaaattgaaagtttgaagaaattggaacgatgtgacggaaaagttgaaagtttgtgtgcaggaaagttcgatgcgacggaaaagttagaagtttgaagaaaaaagttggaatctagaccgtgccttagtgggccgtggacagggctgaaatgaactatgggcttgggtctggacggttgagaaaggcacaagaggagaggagaccaaaaaggaagaggggggaggacccattggattcgccatggcgtcgtcgccgcaccaagttgtagctccccaaccccaatcccaagcccaagcaggtggcggcggcggcggcggtggcgggacggccgagcagttctggtcgctgctggacaaggcagaccggcgcttc

SEQ ID NO: 51570 - DNA, 707 bp, Oryza sativa
aagatctgagggtccacaactggttttcaacgaggtggttaggataggaacggcacataggacgttagggtggatagcttagacgatgtcggtgtcaagcacgtcgcctaaccgcgccgttaaggtaggctggcgggcgcgacaccgtgtactaccgatggagatttctgggtgaattaaagacctcgataactttgcctttcgggcttggaatcgagctaggtttttttttacggctgcagaatcatgggtctcaccctagagagacttgattgggagagatggacccccagagatttttctagaaaccacttaccataggccacgaagcagcggttgttttggcgaaatgtcgaagatctgagggtccacaactggtttttaacgaggtggttaggataggaacgacaacgacacataggacgttacggtggatagcttagacgacgtcggtgtcaagcacgtcgactaaccgcgccattaaggtaggctggcgggcgcgacacagtggactgccgatggagattactgggcgaatttaagaccttgataactttgccttccgggcatggaatcgagctagctttttttgacggctgcagaatcacgggcctcaccctagagaggctggattgggagaggtgggcccccagaggtttttctagaaaccacttaccataggccacgaagcagcggttgtttcggca

SEQ ID NO: 51571 - DNA, 2362 bp, Oryza sativa
gattccatgcacggaaggcaaagttatcaaagtcttaaattcgcccagaaatctttatcggcagtccacggtgtcgcgccggccagcctaccttaacagcgcggttagtcaacgtgcttgacaccgacgttgtctaagctatccaccctaacatcctatgtgtcgttcctatcctaaccacctcgttgaaaaccagttgtggacgctcagatcttcgacattccaccgaaacaaccgctgcttcgtggcctatggtaagtggtttctagaaaaacctctgggggtccacctctcccaatccagtctccctagggtgaggcccgtgattctttaatcgtcaaaaaaaacctagctcgattccatgcccggaaggcaaagttatcaaggtctttaattcgcccagaaatctccatcggcagtccatggtgtcgcgcccgccagcctaccttaacggtgcagttagtcgacgtgcttgacaccgacgtcgtctaagctatccaccctaacgtcctatgtgccgttcctatcctaaccacctcgttgaaaaccagttgtgggcctatggtaagtggtttctagaaaaatatctgcggtccacctctcccaatctagtctccctagggagaggcccgtgattctgcagccgtaaaaaaaaacctagcacgattccattcccggaaggcaaagttatcaaggtcttaaattcgcccagaaatctccatcggtagtccacggtgtcgctcctgcggtcgacgtgcttgacactgacgacatctaagctatccacctatcatcctatgtgccgttccttccctaaccaccttgttgaaaaccaattgtggaccctcagagcttcgacattccgccgaaacaaccgctgcttcgtggcctattgtaagtggtttttagaaaaatctctggggtccacctttcccaatccagtctctctagggtgaggcctgtgattctgcagccgtaaaaaaaaacctagcttgattccttgcccggaaggcaaagttatcaaggtcttaaattcgccaagaaatctccatcgatagtccacggtgtcgccctgccagcctacgtgtaacattctgaaaattcaagacaatgaaaatcacgaaaatttcgaactttttaaaacttttgcatcatgctggttgttatgattgctattgcttgccaaaccgtaaatgatcaccaagaaagtaaagaaaagaactacatttaagcaatagatatgattttcgggaatatatttaatcctacaaataattatgcacaagatattaaaatcaaataaaagaaaagttattattaacctattttatcaaatattaaaatatttgaataatgtaggtgggtgccataatatgtgtacacatgaaatgatgatcattcaaataaactgagctctctgtatatataatagaattacgggagtatttaattcgatatgtacatcgattttgcaccaagttcctacttgcatttagggattgaaatttgatatattaaacccctccatataaaatatagataaattgagctaatgtgctattatgttaataacggtctcattagaaaattatagaatctttaataaaccttaaatattggataatattaaattttgggcaaattcacatttgaacacttaatacggtcacctaaatgtttgggagtaaatacaaatttaatttgcaacttttctcaatttataaatcaaccaaaaccctaaaagaagaaaaataggaaaactttgaaaaatatataataataataagaattaaccctaattaaaaattcaaataaattatataaataaaatatgagtaatattaatctagggtgaattcattagttaagataacacaaatattgagtaaaatgcatatatgcaaaattaggaattgtggaatcaaatttatatggaaattacgctaaaatcgggttaattagaaaacggcactgttcattgcacctaaggtgttcgacggggtcccctaacccagctcctcctctttccccctctctccgtcgccagccgccgcgcaccgtcgccatcgtcgcctgccgccgtgccgccgtcgccatctcatcaccgcggcagcgccgtcaccgtcgcgttccgcctcgcgccgcgcgccaccgctgccgcgccgtcgccgtcgccatcccgtcgcctcgcgccgcgcgcccgctgccacgtgccgcgccgccttgcgccccgagccgcgccgcaccgtcgtcatctccgcccgcgcgccgcgcgccgtcacgtcgccgccgtcgccgtcaagcccgcgccgcgccgcgccgtcctatcgtcgctatcgcgccgtgccgtcgtgtcgccgcc

SEQ ID NO: 51572 - DNA, 1133 bp, Oryza sativa
gcaaaacagagcccgggcctcaccaggcccacctcacaccacgtggtgtgtgaggtggaggatagtccaaccacttctgactgaggacttgaagggtttcttgaggagcacgaccgaggagtcagatggcataagacaagatattcgatgtgacatattcaagggtagttaggtaatattgtgagcacctccttgtgctataaaaggaggggactagccccgttaaaggggtctttggtcggttaatttctcaaggccttagacatcgcctcatattgcttgtaactcctcccttagggaaaagagtcggtctcgtacttcgtcagctggacttccatccggtcgccgacctaggggagttagtgaaagccagaacacaggagtagggtattacacctcgcggtggcctgaacctgtataaacatcttcatcctcctgccgcgggctctcttgcgtactcactcgcctccatcctcgcgacttccttcatgccatctcggcacgaccaccgtccaggtgctgacaaacccgctggacgaatctccattctcacggggaggggttctcactcctgtgggttagcccctatgacacatgccgccaactacgtccctcctacctgccgatctcccgatgcttctaaaccctacatcgatatacctccatatcccttcgagcaaatttattccttatttatcactcaaagtccacatgttttcttatatgtcattaaaaattttctattcggtatttgccatttggtggaattttacatccgtttctatgccattgccattacgcgagtttgaaagtgagcttggattttgctattcccgtgtttactgtgagcatactttctaaactattaaatggtgtgttttttaaatactttttatataaaagttttttaaaaaaaatcaaacagacccatttttaagtttgtaataactaatattaaattattcatgcattaataactcatcttgttttactctacatgacattaataataatccaagacaactcgccgttaatgtctttgcgttgtaatgggattagaaagaacatgtgaagctccctctttactgtaaaaaaaataatatgatagaatgtttttgtacggtttagttttt

SEQ ID NO: 51573 - DNA, 776 bp, Oryza sativa
cattgcacttagagcatcacccagagattacgtataatctccctccaaaaattagtttttggttttcctaaactgaaataggtagctaaaaaactgatctctcaaagagaaaacctaaattttatccccaaaattaaaagtgggcctctactaaactatcaacacattctcccatgttcctctctctcgtgcgcatgtggaaggagtggcactacctcctagcgcgagattggggatggatgagggtgtcggtttttaccttttcccgtatatcaacatagcatatttttcggggaagggactccaaaaaacatgcaagggagtagaggatctgttagagtgttttttccactaaaatcccttaaattagttttaggataaaatagaagtacgttggtgatgctcttattaaagagcgcaaaataggaaggaacccaaatccctttccctagcccccaatcatgggtctctacactagcccccatctattttttttggcacgggtgaaaaatctctagcatgcacttctcctgtcgttttcacgccctcacacaccgccactgcccttctcctttgtcgcactgtcggacatcgtctgaccatcttaccgttcatgtttgtagaatatgttgtttttaagttatataatgcttgtgaactagcatatgtgtgtgattgtggaaattgaattttattatgcattttgcaatgttgaaaaaattgaatttaaatttaaaccgtgatctttaaaattgtaaatttgaatatggttgaat

SEQ ID NO: 51574 - DNA, 1685 bp, Oryza sativa
tttttcttctgtcgccatggtactgctacaacatgttgctgttactgcagtccgaagcagcaagccgctgcagctgcccaagatgcagccgtgctcgccgatgttgtttgccgcagcttcacaagcctctgccgtgctcgccgctgctgcttccgtagcgtcacaaactgccgccgcgccgtcacgccgtggccgcccgccttgctgccccgcaaaatccatccccgccttgctgccttaccatatcctactttattgcaaccaatttttgtttgatttgctcttgatttggaagaagagatgagaggatttggggatgtagtagggttcgaggatagggaagggaatcggccaatcgggacctgcctttctgggagatgggggcttctgcgtgcgagaggggtagggaggggggcaaaacggtcttgttgtgcagctttgtttttcacattagttttatgaattatttttgtcttcttatttgcactagctcaaacggtaatggtaaacggaaggtacacatcagttttaatggcaaatttgcagtttgcgtttttttaatggctatttcgaattagagggtaagagtagtggtatatttgcaattctcccaaatatatgcatacaaataaatatacaagagatgcaagtgtatgaataattagagaatgaccaatgggggtttatcctatacacatagagaaggcatatgtagtaatgatgtagaccaacataaaacacatacattcatgatctccatgttcttaatgtaaatgagactaaataagatacgactcgagtaaaaattaatctcacacttatatatcaataacatggaaatcatatatatgaacctatcaaaaagtaggagataagaagtggtacacatcattttatctccatacatttcatccttgtcatgattaaggtccatcacaaaagaatgcatgtcttccacatctcattatcgggaaataacctagtagacaacttatgcaaaagagaggttaatcccataaacatcggtttatcatctatcaccaaagtaacaattacacaaattgtttaatccaagatctttaaatcttttctctctttggtgatgggtaataacccgatataaacaatatagagagatgagatgaaagatgatttcaaatcaagatagaaatcttataataaacaaaatatagaataagctccccctcaagatgtgcatacatatggatataaaggaacacatatgcacataatcaatcaagatcaatgagggctctcacattatattttggatccacaagagagaccaagttagaatatgtgaagtttgatacatacctctcatcatttttattttcatatccaaatgagactagtcaaagaaaggctcataaaaacgttagtctcatataattagatttgtcattaatcaccaaaaccaaattaaggcacttgaacttacacccccattgttaattttggtaattaatgacaagtactaattgtggactaaccattgtctttgagctatatattttttgagttaggttcacattatgtgtgtgcgcatgagtgactaccgatggattaaaattgatggcgcgaagcgaagaaaagaagacggtaaaactagtgctttagttttaaattgatcgaggtgtaggggcgatcaaattgcttgttta

SEQ ID NO: 51575 - DNA, 2462 bp, Oryza sativa
acgatttcaattgaaaaagtcgtcaataacaaaattatataaatcatcaatatgtacaacttttgttttgctcattttgctatatgactgtttcaataatttgcatttgaatttcaaattatgacaagttcaaacaacattttcaaatactaaatgatttcaaatgaaaaagtcatcaacaacaaagttatataaatcatcaatatctacaacttttattttggtcattttgctatatgactctgtttcaataattggaatttgaatttcaaattctaacaacttcaaacaatattttcaaatactaaatgatttcaactgaaaaagtcatcaacaacaaagttatataaatcatcaatatctacaacttttgttttggtcattttggtatatgagtctgtttcaataatttgaatttgaatttgaaattatgacaatttcaaacaacattttcaaatactaaatgatttcaactgaaaaggtcatcaacaacaaagttgcataaatcatcaatatctacaacttttgttttggtcgttttggtatataactctgtttcaataatttgaatttgaatttcaaattatgacaactgcaaacaatattttcaaatactaaatgatttcaactgaaaaagtcatcaacatcaaagttgtataactcatcaatatctataacttttattttggtcatttcttcatccgataaagtgatagtaatattgttcataaaatttacatatgtcttatatggttttgaagtatttaaatcgcgacgaaattgctataacgtcacaggttttgggccggtttatgacgaaatcgataaattgtcatggtattatgggccttgtatccatagttgcatatccgtgacgatctctgaaaacatcacgaaaatttcatcaaatttcgtcacatattaaatagattcttgtagtgccctttgcctcacgatatcgattaagctcaaggctagatatgtgccatcctctaatagctcaatcattcacttgaacttgtgatagattatataacttgtgattgactcctcaatcacctttggcatggccatgcactttcataatctataacatcgaggggcccagagatatctctccataagaggggtaaatctcatcttgattattcgtatcgcactacggagtagcgtttagtagtccctaagtaagctactacacatgttgggaaccatgataatctcaggtctaagaattcaataccaacacatatggctcttgcagtgtctcatgttgggtctatccaacaacatgttctcccaacatgtgtccacattattaatttggtatctctataccatgatccatgagacatgatcatcaattaatacatgtgctgatcatttaaacatatttgttgcacatatgatatttgatcagggatcctttagaaatagcaacatacaacataaagagtctcatgaaagaatcacatattcattaaccaataatgagttatctatttcaaggaacaatgtcggataaatatgtaaacatagtatgtgatacaatcatctctatgattacctctagggcataccactaacacatagaagacaaaagataaagttctacacgtttaggatttggattcgggcctcctgacagcaccaacttcaaacggacctagctgctgatatagaaggaatttcggggcccatgagtactgtcagatggttttgaaaaacttatggagtctactttcagatggttttggtcccacatcaaaattcctaccgagctgtcgggaatctgcaaaacaagccacataccttatccagtccgaatctgatttgggttttgggccttgtaattgtgtcgtgggcttaacccaagcgggtgtgcaccctaaggcaaccctacgatgtccctaatcatatttattcagtagccaccatcgtttagagggggttttgcttagattaatctgtcaagaacagtttcgccgctagatcggtttgtggaaccccaaattcgagtgcttaatcattcatatgcaattgtgttgcaatctatcttgttcttgcttgtgttcttgaattcgcatatagggattagccttctcgacaaggtcaaccgggtttcggcatggttgataaccagagaaaatatggtgctgcgattatggggcttaagagcgtgtttgttcagaagccggatcgagttgtgtcgctactccaccaaatcgattgttaatcaatacctatcaaaagatcgggacctatttcctcattatttggggtggaagtgtaacatacccgaaattttaggacttaaaaatttcttgtcaaaatagttagaggttaacttctccaatttttagagccaaaaatttccgttttaatttaggtgatgaccaatttaaaccattgcatgattataatttgagaacaaaataaaatcttttcattcccaacattag

SEQ ID NO: 51576 - DNA, 26144 bp, Oryza sativa
cgggcgtgccgtcgatggaagcgccgagcggaaggggaagaagagaaggggcaaaactgtcattttacgcggtttctctctcatcaattcagtggatattatattttaatgtgcccagtgtcctgtggcaaattaccacacttttagagtgtcctcaggcaaattcacgcctttcgggtgtcccccagccaattacacaatttctaggtgtcccagggcaaattttgccaatatattttgatatattttgatagaagcatctactctatattggatagaaatgatatggtttttgataagactccaaataaatcttatgtacaggtattatttagagcaacttattggctttggttctggggccagctttcactactacaaaatcgatatgcataagtacctctttcgcgtctgtgaaaatcatcctccattttcgtgtgcagcttcttgagaggaccgcatggaaaaatcgatttccgtgcgggccttttaagtggaccgcactccaaaatgagcctattttcgcaggcagagctcttaagtggaccacacgcaaaaatacctctctcttttttccctctcactcgctcgcttcaaatttttcacctcatctctcttcctttccttttattttcgctcccctctctctctttctctcctttcctctcctctcctccgatcgggcaggcgggctggcgcggtggccggtgggcggtggggaggcgtggcggcggcggatccggcgacggtgacgggagagggtagacccggcgacggtgacaggagcgggtagacccggcgacagcgaagacgaggatgacagcgaccactagggcggcagcggcggcttcttgggttagggttttttattttttggatttatttttttccttttttatttttgcgtgcgggcgacataagcacccgcacgtgaaaattagatttttcgcgtgcgggtgtgccaccagcatgaaaaatagcgattttcgcagaccatttggcgcgtgcgggttgccatgccgcacgcgaaaacctcttttggactgcacggcagaatggttttcgtagtagtgtttaaaggtgtaaagagtaaatggaagtcatatgtgccgcatgccagaatttagagtcattagtcatgctagttttcgttaacttatggatgaagatttagtaatagacttgaactttgaataagttgctatttttctttggctggtgtggttgtgtctgcttttcatcttccttttttttatttttgttgtatttgggcttcgtgctaataacttagtaataagtggctgtagcttcaattgaagcaaagcccgggtttaatatctattattaaaaaagcaagattatttaagtgactcgattgttaactatatattagatgaatggaaactgaaactgagataacaactgagtgattagtgtagagtaccatacatacactactggaaaaccgatctttcctcggtcgccccaaaaccacaatagtcgcggttataaaaagaacccggactacagatgatttttagtcccggtttaaaaccccatagccattctacgatctttagtcccagttggtaacaccaaccgggactaaagatcatctttagtcccggttcatcccctgtcagtcccttgtcagaggggcgaggatctttagtcccggttggtgtcacaaaccagactaaagatcaccactttagtcccggttggtattaccaaccgggactaaaatcacgcgtagtagtatataatccctattacctattctctcccccactaccggcctcaatctcctcaacaaccggcctctcctctcgtcagatccatctccctctcctcctccccttcctccccttcctcctcccatcccggccctctctcctccccctcctcccttcccatccgatgcccagcgagggccgcctcctccccctcctcccttcccgcacgcatcaggcagggccgcgcccggcggggccgcacgcaggccgagtagcgaacggcggcaagcggcgctaccgcatccattcttttttttttttttacaatttgtgattcacttagatgtataattttgtgatttattgtatggatctgagatgtataatatgtgatgcatttggtttgtgtgtaatttttttaagatttgtgatgtatttgatttgtgtgtacaggtaatttaagatttgtgatgtgaatgttttggatgttactttgatttggggtttgatttgggaatatgcatcccacttgatttgggagaaaatatagggattaaactctggctaaaaaataatgaaaaaaaaagaaaaggagacctaatgagactgccgctaccctctctttagtcccggttggtgttaccaaccgagactaaagatcatctctagtcccggttatttcatccgggactaaagatagtggtgatctttagtcccggattcgtagttccggttggataaccgggactaaaggggggttacgaaccgggagtataaaggatttctccaccagtgatatttcatggtccttcagttatcaccgtcatctcagaaattaccacaacccggaatcaataaagagtaaatttcacgaaactacagatacttgtgtcaaattattacaaaactacagatttaagaatgtatatcacaaaactacagatttagtgttaaacttttcatggaactatagatttaatgcaccatatcataaaactacagatttagtgattaagttattaaagaactacatattctagagtttagatcatagcactattatttatttaaagttataaaatttgtagttttgtgataaaaaatagtttttaaatgtgtagttttgtaataaaatagttgttaaatcaatagttttgtgatataataccttaaatctgtagttccataataaatttaactctaaatctgtagttttgtagttttgtgaaatacattcttaaatctgtagttttgtgataatttgatcaaagtatctatagttttgtgaaatttactcatcaataaatcaccggaattgtaggtagtccacgcgtatgttcaacatattctgttcaatcttcataaaagaacacgtaaccaacaaagtcccaactcatggaaaccaatccttacgtacgtgagtatgtgagatggctgttctctgccatcctttaagtcacacacgcatgtttttctcatagacacctaataaaaatacggttataaaaagaacacctaacaaaaagagcacacgtctgggcaaagaagaaacaagtctttgcggcacacgtgtgatcaattagatccatatggatacaatattttttccgagcgagaaccgtatcactatacacgcagctgtattttggccacgaatatccgcttgcgtagtcctgcttaagccttactacttcttacttttagatgtgtgcaataatgactcagctaacaaccacctggccagttgtcgagtaggaatcctaattagcgtgctcgtgttagggagagaagtcgtgtgcggttcccggccgcgcggtgataagttagggttaatggtttttgggcagggtcgggggagggtggcaccaggagggggaatgggggatcgggtttaaagggatagcctgagaggtggtggactaacggtgggtggcatacaagggcaagcgacgaggcggcggaggtgtcatcagtgccgtggtgtcggtagcaggcggtgggtctcgtgatggtggcggagtgataacaatccggtccaggtggagttggccgaggcctaacaaattaaagttgtccggactccaacagttcttaggtacacccattcggggaaaggcccaatcggagaccctaacagttcttaggcacacccactagggggcctagctctgataccaaatgatacatccggcctaggtggggttggtcgaggcccaacaaattaaggttgcgttgcccggcacacccactagggggcccagctatggtaccaaatgatacatccggcctaggtggggttggtcgaggcccaacaaattaaggttgcattgcccggaccccaacagttcttaggcacacccactcggggaaaggcccaatctctctaaaagactggtccaataggggaagggtggatctcccttttaaggtggcttcctcctcccaaactaagcaaggtgggattattcagaggcacacatggtccccgcccgtctataactggaccacttggcccttgttgcgtctttcccaacgggtaatagtggaggatgtccttatcacggagacaaagcgatgcaaatgggagagggaggaggtcgcctggcggggctgcgctgacaagttgacacctttctatgctggcgaggttggggcagtggcacgatggagtggaggggaagcgggtgttgcgggtggcggtatggaaagaacttacctattaccagagggaggaggcggggactcgctagagagcctctagccggcgctagtgctctactcgcgtcatcgttgccggagtgaggaggggctcgctagagggaggaggtgcgggctcgttggtgccgtcgtcattatcgccgctttgctcactttgactcgcgtctaggatgagagaaacatataagggagggagagatagagagagagaggagcggtccatgcgtgccacgtggagatagaggacaacaagggtggacgcgcgcaacttcgcctccttgcacgtacacgagatagcagccccaaggtggtgagagcggcgttggattagctgttcaattatagcgagtgtgcgtggcagcattccatatatgtgggatggatgggcggctggcctgctattgatttgggcttaaattgttgactaaacttcccatacggtattctttactggagctagctaactatatttatgagaggattgcgataaaaacaattgattaccttcttggaacctgagagaggcagaaacgtagagaagtaccaattacatacgaaaatttgattaaaacaaagcaaaaatatatgccgccacaaattttagcaaaacaaccctttctttggtttacatacaatagaatctggatcgaatcctgaacaccaaattacaaaaagatggagcatcaaattagaaaaaaatattttatttggttttaatgaaatttgtatctgctacctaattggacttggtgagcaggctaggaggtaagttcttttgggtgaggtgcgtaagagtccaaatagggccacaacacgttttacatgaacatccatataccaatgacgaagaatgaaagaaccacctatatcgtccaaaggggtttttaaagtccttttcttgttttgtgtggatgtgtgcgttgacgtgagggtagtagcaggtactaatctaggggtaaggttggtaagaaccgatgtccgatgcaccgcttcaaaccgtgacagtggagggtatgattaaatgttggaggaggtgggaacgtcgaatgtggtgctagagaaggtggaggtggcagaggtggcatacctaacgccctgggagtcggcgagggtagatgtggatcaagcatcgtaggaagctagaacgactgaggcatcacaaatgttattgagatgggtcggcgcggggcaaaaacctttatgggcagggcacccacaggaataccggatgccttgggtgcggtaggcggctgtgaagacctcacgagcaactcgcttattccatctactctccagctagctcctctactaatgagatcctccatcccctcgccttttggcgtcaaaccaatgaagagagagataggacagggaagagatattttacatgaaaaattacctatttacccttaaagctccataaactgttattcagcacgtgatttataccacgggtataataatttctctcagattatcggtatcgtcaagtaccaaggtacctcaaggatgggaaaatagctatcgtccaaaaggaaagctgccttgcgtgcgtatggtaggaaagggaaagcgtttgcttgcagggcatggtgattgctatgttggcagaagaaataaagattaaagcaaacaagaagtttatatactggagttgcggatttccctatcatgcaagtttttttttttaatttttttgtcaagctagagtcatgcaagttttggatacatgtagtgtaaccaacagagagaaaaacgaaaaaggccactaatgaagagcagaagaagaaatgttgatagtacttttgggtatcgattacgacagaattagcccacgtgacagggcataattaatatatacctaccaaagcagtaacttcagcctctaattgaatatcacaccaaaaatcaagccctgaatcgggtacacctttttaattttttgtgctggaaaaaacacgtgtcttttgatccatcatgtacacgaaaaactaattaatgaaactccttctatccttctaaccatcaaggaaaaacacacacagctcctatatataaggctacaagagatcgtggctgtaggtcgagcaaagccgaaattttattaagtgcacgagtcgacggtgtccgaaagagacagatctagctagttcacaactcttgagcaatctagctagttcatgcacgtaacgttagcaccaccggccggccggatcgatcaggttgtagggattacggcggcgatcgatggacatcgtcggcgcgggcacttcgccggcagcgaggtggaaggcaccggcgtccatggtgttggtgcagctcttcaactcggggatgattctgctatcgaaggtgtccatcaacggtggcatgttcgtgttcgcgctgctctcgtaccgcagcgtattcggtgccatcttcatccttccctttgcactcatcttcgagcggtatgttttagtttttttaattgttcttagctacaaccggttaaatttatgcttaacaacaagctcttatgaaacatatctgaaaatctaatatttggaccacgcaacaataaatggccaaacaatgacgtacggaaaaaaagtggatttgaaaatatgttttgctgggtttaattgtaaattaatttagtaaaaatatttgaataataaaatatcttccaatttatgggtttttagatgaaatgtatgggtatatatttgtgggcatactcttttttacttaaaaaaaagtgtttttttattatcaataaaaaatttaataagctgtaaatcgatggactcattgacaacaccacatgtaaaacttgtgactgaatggatgatcatgtgtcgatcttgtaagaggaaaatgcattgtaaaatcgggtgtcatgatgaaaatataatctgcttttgctaatttggttttgtgtatatctttcaaaaatatttcgttttgggtagaggcaagtggagggacattgattggagcgcaaccggatggattttttttaatgcgttcatcgggtacgtgtttctctgaagcttcaaatgcagtaaagtactgcctacaattaaacttatgattattgcattatagaattttttgattcgatcgacaatacgtacatgaaatttccatatttgtacatgtctctaacctgcatatatttaattaccttcgtatcattttacccaaaaaaagtgcagatgatttcaaacttacaattatactaacagatatttcatcgtgtttaattatggtatatggtatttgtatagcgctagtttttaagctgcagtaaatacattaccctagtagaaaattaagaagaacttcagaaagcttgattttataaattaaaattgttgaaaatataccggcattgtcacaaagtatttatacatcaataaagttcacttcattctaaaaatctcgtattaaaaactggcaattctatacccaaaactaaataatcactgattgatattggccgaacaattgcaatctaaaatccttcctctattctaaaataagttggttattagtatttataatttatcccaaaataagttgattcttaccattgtatccttaaatatctcttttatatacaccaactagtattagttttctattaatgggaggtattttagtctttttcgctcgcgatgtcttggatgcgaggaattcattaattttgagacaatgagtttacattagtgagccaagctttgacaaggacggccaaattaatgatctgattccgagcaaaaaaattcttgatcaaattggtgcaagaggggatatttcatgaaattaatttgatcaaataacacaaaagcatttcgctaaatcatttgatatgccaatttgctttttatactttctgtatctctattacatttgtaaaaaatatttcaccattctgcttagggaatcttttcaggctattagccaaaaaatggcctatttataacaaaatcaaagttttcacttcatttgtatttgcttatactccctccgtcccaaaatataagtatttttagactctgacacggtctccgagatgccactttgacgaacaatatctataaaagtaaggtgttttaaataaaaagtgttgcatattatgataatttgttgaatgataaatctagtaacatcaattttatatgattgatcttttttatatttttgctattaatagtcaaagtttagaatgtttgacttgtcactaaactaaaaatgcttatattttgggatggagggagtaattttttgtgggtcgagtgcatcttagttatgtacggtctagaaactgatttaaagatggttgtatccaattatcttgatttcagtaaaaagctcgccagtcatgtttttctttcattcatagatacaaatgggtgtgtttgcaagagcaagttcccaacactcatctctcgttttccacgcacacgcttttcaaacggctaaatggtgtgttttttgcaaaatgtttcgtgtttaaaaaatcatattgatatatttttgaaaaaaaagtaatacttaattaatcacgcgctaatggaccgtttcgttttccatgcatgggaaatggttcccaacacccacctccgaacacggcggctgtgttcttaccccacgtttcccagcctttctccctcgttttccacgcgcacacttttcaaactataaaatagtgtgtttttagtttctatatgaaagttgcttaaaaaaatcatattgatccattttgaaaatctttttaagctaatacttaattaatcaggcactaatggaccgttccattttccgtgcgcttccggttgggaactccatccagcgaacacagccaacccctctgtacgaaacggctctctcgcgaacgtgcgccaacttttgatctggcgaatgtgtcggcccgcattctttcccttttttatttgtttccctttccttttttgttgcgtgggtcgtttgctctcggaggcttttctatccacttcgctaggcgagaaggcgaatctgtcggagtgaggaggacgaaagacgcacgacgtacggagaaggggagcagggggagcgatattgttctttcctttccaattttcagttttcttcttttacgtgatccattttctttttcttttttttttcactaccgtttttctttttcagatttctatttttgttaattatttttattgtttctttaacagaaacatttttatatgaattatttcatgaaaactttctacatatacatatagattttatgtatgtaaagtttttatatgtagattttatatatgtaaagtttctatatgtagactttatgtatgtaaagtttttatatgtagactttatatatgtaaactttctatatgtagattttatatatataaactttatatataatttatatctctgtaattagaaagtttagtgtatcaattttaatagaaatagaaaaatgctgatcatcaccggatatttttcttttaaaaaaagagtacaatccaaacaaaacaaacgttgtaccaagaaaacataaagcatgcgtatacttcgtattttaaccgaagaaacaaactaccggctcgttagtcattactaatcacgattaagcatgtaatttggcatgtaattagccatgaggaagaagagatgaaacggcagtcggaacattcgtgcgatactactagatgctaatcacgtgcatgcatatatatgcagcggagaagcgataagagtccgttcgcttgtcgcgaacgctcgcgaatcagactcacccgaaaattaatgcattttgtatcatcttgcaagaaaccgataccataatgaaatacattacatattgtttcgtacagtacacactctacgtactcgtccatgtatagaaactaattggactgcgatgagttcccacgataattaaagaagaaaaatatcaattgggatgggactgaaatataatattttggattaaaagtagaagagttcacattgggcacaacttttgtaaaactaattttgaatttaaaactgttaaatcaagaagaaactaataaaattaagacatgaagataaatatctatcggtacttttcatttaagattttcaaaattatttgatagaaaaaaatggttatatgttgagaaaagcaattttactgtactaacaactgaatcaaaaataaatttactgaccaaccaaatatatgccaaattaaactctgagattatatatatcttattttcttttttctatgaaggaggtgggtttctgttgttccgaactaaaaaaaaataaccaccaagatatgttgtagcattaaagaacgtgacgatagcaatagtagtgcaacttgtatttcgcttgcatgtacatacgaaaagtatacgtaacaaaaggctgcgagcctatctctctttgttagaacaaggtttaatattttataatttattttaatttccatcttcaatattttttatatctatctctcctttcctagtctgttggacttgagattgccctttgctatttacttctacgtgcataggtagccttttgcacatccggtacatttttttttaacaaagattaagttttaaaccagattgatggcactcttgatttaatatgctctgataattctctcaaaatagtttgggcaaaacatagaaaatttaactacacatatattaactctaaaatgttctgactatatgtacatcttcttattttcatgttcgtattacttgcaagagagaattcattctatgctactgagtttaatttagttcaacgatttgtaatcgttattgattttgtctcactctataatatgctactaactttgtcaattttttctacaatatgctatttatttggttggatactttttaaaaaatgcctataaaatatccttcaaaacttactagagttgataattgattgatctactggaagtttcaaaaacatatgaaattttttatatagccaccttatataatatagaagtgtgtatatttgaagaatttcattttgcatgcattaactttttatgaaaatataatttatgttatatatcctataggatactcttatgttaatgctctttcatgtaaatcatcattcatgtgctatatagttattttttttatgcggctatctttcatgtatgtgattcctcttttatatgctacacaaaaatagtttttttaaaaaaaccatgaaaaaaacccttgaaatatacaaacaaacatctacattttataagaatgcaatgtaaaaaaaatactttcatattttatttgaaacatctcgtgggtcaatcaattgccaactctggtatgacttgaagggcattttatgtattttttgaaaagtatccatctcaatggtatattgtaggaaaaaatgataaagtcagtagtatattccagagggagacagccgatgacaaatcgtcgaactagagtacatttagtgccatataatagaaagcataacaagttaagttaatgtatatatgtactaaagcaattaatttgttaaaaggatctgttgagcaaagtggcaaactccagttatatatgtccttgaacaacaaaaatgagctgataagtcggtcatgaactatacgctagaaggatctgctgcacaaagttcggtcaaatgcttgaccagaaacaatgaactcgtgataagtccaactactatataactgtaagttagtatttttttttttgcataatgaaaaaatagttccaaactttgctgaaaaaaagttataaatcaattaatacaaagtttgtagtaaaatgactgcaaattaaaaacacaatttgatgaaagaaaagagaactaactggaacatcagcctaaagacagacataacaacctattgagtaaacttccatctctaattggtatagttgtatgtaaaccacatacggttattgcccttctcaaacctttgcatataataagatgtatagtgagtgatgcatattggtttgaaggtaagatgcaagtatacaatcatacaacttgcttgctcatggctaccgtgataaagaaacttagcctccaataagatattaattgctgatggcagtatcaattcggtgaaaacctaattagtaatcaatttcttgatgaacaaatattactaatcatccgaggcatattacattaagcttttctttactgtatgccaaattatgcagatatgccgtaccaatgagcctctactactatggcctcaaggataccacaccatcctactccgtcatctttacaaacataattcccttattcacctttgttctttcacttgtgtttaggtaaatgttccattcacaatatttgttgtgtacaatatatatacatggcaataactatgggttccaacaataattattccatggcatgagaaaaaaaaggccatataggtaaaacttaaattgtgttgcaactatgttccatctcaccgaaacatggatatgtatgaacatgatagactagagacattcaaattaagaagcaaggctggcctactgaagatagtgggtgttctggtctctgttggaggcacaatgcttgtcagcctttacaaggggaagtcactgcatctctggaattccatcttgcagcaccaaaaggaacaacaaacgaagtctgcaaccaatcagctaagagggacaattttcttggcaggcagcagcctcacctttgcttgctggtaccttgttcaggtaatcatatataagcattgtttctaacaagtacatacatatcagagtaaattctttttctttttttaataattataggttgtgtggatcatcttgttgtaattgtttgagatcaataaagcttcatttgtctaaaaaatcagagtatattaactttatctagaccatgtcatcttataactgttgtggcagtcaaaggttctcaaagtgtacccgtataaatattggtcttccatggtgacatgcttggtcggaggatttcagacagcatttgttggaatcatattaaggagagacaagaatgcttggatgctaggatgggatctcaaccttgttactgtagtgtactcggtatgccttcgaactttcttaagcattgaaattaactgaacagaaagctacacaaagaattatctttctacaaaattattgttcctatatttcgtagtatccactgaagcttatattcagaaatatgtttgtaaaaaacattctgttatgtgttttcacgatggtccactgaagcttgaattgtattactcaacaatccaggatttataagatgattttagagcaatgatgacgaattttcaggaagtgtaatgaacctaattaactgctgtgatgaaattgacatgaaactattttggtgcagggggcacttgcaacagctggaaaatatagcctaaattcatgggcagttgctaagcgaggcccagcatatcctccaatgtttaacccactatcagtcatcttcactgttgtttttgactctatccttatgggcgatgatcttacagtaggaaggtcagtagccttctttggtgtctatgatgcatgttcagtgttaccaatcaaaatggattatgccagttcatgtgccaaatgcttccctatgccaaaaactaattgacactcattttttgcacagcaaaaaaaaagaagcaaactttgtaaattgtctattattattgtgcataatcatcaatgaacaacaacaaaaggaggaactgaataagttggtaatgtgatatgtcaacatgagcttgttctttttttattacaaaagataaaagtacaacatggatgacatagaataagagatttgctccggttcaaaaaaagtacctcgaagtatccgtacctcacggtaccaaattatttccggttgttgattttaaaatgcccatcgtgcgcagctagatccaatgatcaaaaacgatttggtatcgtaaggtatcggtacctcgaggtactttttgctagactggagcaaatctccatagaataaatttcagaaataggttacagagaaccacaaaagttttagcacttggcatataagcacaataattatggtactccctctgtcctaaaatataataacttttagtacttaggatttgccccaaaatataacaacttctccaccaacattccctttccaaccaatcataaccctccactattcaccttttccacctacctccacttctcaaccaataacaacccctgcctatttaattctacctactttcttaataaccgtgtccaactctaaaactctctatattctgggacagagggagtactaaagttttacgaagtcaggatcctacaacaatcaagctatatattattagactccgcttggcattgaagtggattacgataatcacgtttgccgcaataactttaggatattttggtgtttgataaattatttttcttatactttgtgtttgcatctgcgaatattgttatggtctaaaactatcaaataattgcgagagacaacgtcggataggatattgtatctaattgtaatatgatatatatgtaaaacaaacaatatcaattattgttccaattttcatagcaacttaaataagcacggtgaaggacaaaacaccacaacaactactagaacccaaataggtactgcctaatatgtgccggttattgtcaacaatacacactgaggcttactccaggagttgatctacaaatggacgtggacattccaggcagggtgccctgacgtaacaatagcttaatattcatatggacactgtgcataaggatggctaaatttgttgatagcgttttatgaaaatgttataccatattgttatggttaagtgccaagtgataaaataccaatggtttcctctaacttaaaccatatggcatgtgtatttgtgaaatttactactgtactttgtgatccttgaatcgttatgaagtgcatttgcgttacagtttaaattttagtcaacaattgtttgaattgttctcttgttttgaatgtgcagtctcataggcacggcaatggtgattgttgggctctacctttttctctcagtgaaagcatgagaaggtccatggatgtaaacatgtagattctacaaaggttctcgaagctatagaatagagttgtatatgcagacagtgaaatgtatgtaattcaataattaaatgtgaaacaatatactcgaggaggtgagcatgcacttacactgtttgtttattaatattttgctcaacaatactacaatatttcattgcaccactaaaacaaaatattggtccatgaatataatgctgcttgttattttaatttgaatggatatcgcgtataagtaataccttggaataaatcaagctaataggaataaatatgaaaaatgcacggacaacgatttccatatgatgaaatttaaaatagatccgtcataaatagagtagttaatataatatgtgtaacttctaacttgttaggatataagcaacgattgaaataaatgaaacaattgactggcatgtatatatcagttatataaggtataaggtgtacatgggtatatgtattgattggggcctccaagtacattgtgccctagtctgctgccccatcgcccaacctcaggaacgtccctgattggtggaaagtcctatgtcctctcattactactttcttaacgcacctaaaagaacatggtggtggacatgaattttcttctatttccttcatcctatatggtccctctggaacgcatgaattgcaaaacacgattaataagctaacaccatcccggtattaagcatatgtgtggttgtcttgtttatattagttgggttattaatcgtctcaaatgaacactttccctataggcacataactatcatcatatgcgcatcgcttatcgctcgagtctagaaaaggttttcatcatttttcctttgcaaaaaaatctacacctgtgtggctcgactgctcaggttgaactaccgaagcactagcttgcttagaaggactttgggtggagacagaatggattcccatgcctataatcttggagacggataatttagatgtcactcaagcagtaacaaaggaagctcagatggagtaatgatcacggaagcaaaaaagttgatgcaatgtctttaaagcgtgcaagtgtaagataaacaaagaagcgaatagggtagctcatactcttgctcaaactgggcatgagttcaaggtcaagtggaaagtagagattgtgtgcacttgcgtgtatcttggacttattgaatcatgaatgtaatccatattttgataactaataaagctctctgtttctgctaaaaagacaaaggttccactcagtccagaaataatagcatagtttctaggcatggctaagtaaggccattatatagatctaaacaataggaatcaatatcaaagcaggatcatgcaaaaagtaggtcgtagataccaataatgcacatttcaaataggagcaattatgttcttacccttactttgggttgaaattatgattttatctctgtttcgttttgactctgtcctcactttttttattgaagttacgggttgcccctaatttgttagtttgtcaattgtaaaaagacatatgtacccttgtatcttattgcaattttgcccctacttttgtaccaatattaattgttttccccatctttgaattatgacataaattttgctcatgtttttaacataattcaaatataacctgaatattgacatatttttatgaagatttgacaaatacaacaacatttccatagaatttaacaatgttggctcttggctccacacatgcgttgttgatgatatgggcttcactagtgctcattgtagacacatcatcgttgttggtatttcttagtgacattactagaaatataattctcagcaatgacgcccaaatattctcgatatatttatggttacagatatgatccgcaagcgcacggatataccattgcattatttcacccggaagtaattcaaggtatcatatttatttaattccaaaggtagatatgataagagaatactatgctaataatttatatattgcctatatacaccaatgtctatgcaggggttaatcaattcaagggtaggataaggttgacacatagaagaaaggactaaggtactcttcactaaaatataatctaggctaagtggagaaagaataagaaaagaatcattcatatacttcttgtatatagttaatatatttaatatattttgcacttgctagtatacaatcatgcaaccaataccccctagctataccctcctggtgtttcgagagaccacccctggttgccgatttccttaggacaacatgtcatggccatccgactggtaatgaatacagagcagtacccataccaggaaagtgtcttagtattatatacgaacgtgaaggaatatccgtactgagctgtcaccatcagcggcccacctcgactgacccgcagtatataaccccaattaatggtacctaataatctaagcaccatgctcacattactaaataatactccacatcgctgcagcagacatagagcaatcatagaaatgaacattaaacccacaccaaagcatatatctggtaagctagttacacaattatatcgagacaagtacgaactaaagttggtacccgaataatatgaatgaagtagaagaccaaagctatataaagaagaatatttcattaatactataagtcttacaaaagaaggaagagctagtagagacatacccaaaatcttctgaagactcgaggactaagagatctactctattcctactccactagcactagaacaaaaaaactaaacttgagagagcttcttgatcttcttcttgagtgtgtgatggagtggagtgatgtgtggtccttaaataagctaccaatgacgattgtggcggttggcattatccgaaataccacacaaccatcattgggtagcaatcatggatgtccacgtggaaggaggccatcaacggtggagctgggggttcggctgaacccagggttcagccgaaccatagactagcctaaacgggccacactttggcaggtgcgtctcctgatgactcctttgtccagtgatatggtggttgggcccatttgatgctatttgactagatttataagcccatccacccataagtctacctctcgacggatttcgattgatggttccgttaattcccatcaattctcctgcaattatgtaaagttctctgcaaacaaataaaattccaagtacatgtggagatagattattcttaaacaaaatatgcatgcaagcatagcttgttctcctttattttggatatattgacggttgaaatgggtcaataacaaccgccaatagtcatacagttgctcaatgctgacaatgcagtacatcgatctctctgtcaatgcctattcttgagcctatcacatggctatcccttgtcctccccatatctggcggctgcttcatcatcggctcatcgtcgagggtagctaatgctagggagaacccatcacttgctcgcccgctcagatgggggaacaatattactagaaagttcttcttccatttcatgaataatttttgcttttatttttccatcttaacctcaccaattgtaccaattctaggcctgccgaacatatgattaaagcaggggcaaatggtacattaagtttaaaataatgaaattaaaatcacaagcctaaatgtgggcccccagttttggaaaccagaaaccccatgtgtttacaataccaataccattccctagatcatcaatggtataaccatgacatagatgtatatcacattgcctccattgtcataaatgtcttaaaatacatataagggttacctgagtgggacccaaatggaccaaacatggtcttttacaaatacaattaccaaaagatgtagataagatagcgaaaccaaagttgcggcggtccacctctactccacatgcaacaactggagaacctaggtttgtactgtgtcttcttcgactcctccttctcactggtataactctgttgctatgggattactagaacacttggcattacctttaagtagtatgcattggtatcatgaaaacaaaacagggaaatcagttcatgtactctgttgccctgatccttgcaattgcagaatgactgcatttgaagctaataacttcaccacatattggtaatttttcttgtggaactgataagggaaattacataaatacaaaaaagaacatcacacagataaaccaattgcagtatgtgttgaacgttcctgttcctaaaaaaaaattcagttatggatgtgggagaatactgaaacccaagaaattgtgaatgcttacaaacatagaaagagttaaggaaggaatgtcagtaatgatgatagaaataaatgaactcactgaatttagtttagaggtttgaccttttcctctctctttttttaattagatcagatacaaagaaagcaatcatgtacgataatcttctcttccacattattcatatagctaattttagaatgagaaacatgggaacataatatatttatatcagggccagtactagtattgtggttagagggccatgcatgaagccactatcgcttgcagttcaacgatggtaatctgaaatcacatacatgatgattggaaatagacaaagtccaaaactgagcaaaatatgacaggaaacataatgcaggaataagatattccaaaagcaaaaagtagagcggtaataaaataataaaatggcataccaagctttccagcaattcctatttactaaatgttcgtctagcaaacattattggcatttgtgcaggtgtaaatatataatcacaatcagggtttgcaggcaagatgaataaataatttagtaatctcctgagaaccctgattcagctgagaattgggttacatataagttgagtggaacatgtccaaatatataaggattttttcttcatttgattacaacaaattgtacgtaggtagtagtaatgtaaacttccaccaaaattattctaaaattaagacctacccaatggcaccgggtttgcatttttatccatttcttaggattttcccttttgcgttagattagaaaggttgatcgttaactcgacgtttgttgaacaggttacgtttgcgaagacaaagccacaatagtcgacgaggagccgttgatcaaggcaagccactacgctcccctccttgtgcatgtgagtacctaaacttgtttgtgagccatccttaaaatttttatctatattccttgctgcctgagtctattatttatgcgtgaccaattattgatactgcttagtattgcttgtgtagacgaatatacactccgtgcttatattatggatgtggttgtggcgatcactcagtgggagtgattgtcggaagacgggtggagacatgagcgccacccgtaactaagaaccttttgcgaaaactaaaaactaaatgatgactaaatattttcgactaggtggcacatatagaatatgggtggctccacaaaatggcaagccgccaaccctggccatttaaggactgagtcaagaagctatatgcacgaaacgaacctagtatgaccgcacttcttgtatgggtaaagacccagcagactaagaaacccaagtggggtggcaccccagtcattgtagttatgcagttgtgacgattgtgacagaagatgtgatggattgactggatcaattgcttgaacaccacggcaaaaacctaaaatgcacctaagtatattattatatatttgtataacccccctagtatctcgggagctccaggactcccctcactaccgtctcgaggtagggttggtgtgccggggtgcaatgggtatccatagtccttggagcgagtgctgccaagcgagggtgaccgaaaaaccgagctgggacaaatctaatgtgttaggtgcatcacagagtgcgggaataaaagcgtacatccattgcagcgtgagtaaatcaatctatttgaatagtcattctcacggttaattaagcgccgggacttgtactactcttacttagaatagggttttgaagtgtgaccttgcccaatgtgcgggaaggtcggaatggtgaagatggtatgaaactaatgtgagggtaaaccagacaaagcgaggcttggggaaggtggatgaacccttgttgataaaggacaacaacaacttaacattgttttcagttaaagctactaagtcataggtttacgaaaagaattgcgaactctagctttatgcaaatgaaccaagccatccttgaacccctatgtgcactaaatgcattctgtattagtggcttgctgagtacggttagtactcacccttgcttaattaaatcttttagaaggagaggttggagctgacacgtacgtgtgcaatgatgataaagaggtgctgaagacggtggattagggacctaggttcaccagtcactgcctgtggaataagatgaactgtcactgcttcgcttccactaccttatctattcctttggacatttggtattgtaagtccaagagccgaacctccgactacaataattcctcatcgtctttgttaggaggcggttctcgcaagttgcgaggatgccgtccatctattactctggattcacttcaggtggtcgaggtatgactacgactggtcctcgaccagcagcgtagcggtcctcgtaccacgacttccaatggacgaggtatgactacgactggtcctcgaccagcagcgtagcggtcctcgtaccacgactttcaatggtcgaggtacgactatgagtggtcctcaaccagcggcgtagcggtcctcgtaccacgactttcaatggtcgaggtaggactatgattggtcctcgaccaccggcgtagcggtcctcgtactacgacttccaatagttgagttacggttacgactggtactcgaccagcaacatagcggtcctcgtacctcaatttcgagtggtcgagtgatgactacaactggcctttgaccaacagtgtagcgatgcccccactatttctgtgatttgttgagtacaactacatacctagtcttcacccagtgtggtggtcgtctcatcatcttatgtatgacaaacttctgtaagtttttatatgtgcaatatttatccattgatcgctttttcttatatcgctttcgtcttgaagttggtcctatcgtccctttacgctaatcagacaaagcctccgagagacctaagggaatttcagcaggggacaccaagagcggataaggatttgttagatgctgagagccagacgaccatgtcagatctggtcatgtaagagtgctcaatggacgcgtattaactaagccatgcaatcgggaattggtttttccaacttcactgctgggggctaggatttgttagcttcagcatggtttgctataagatttaagctgcctttgtggaaaatggcttttccataaaaacggttgggggctaggaagagtaccaaactccatttgctgagggcaattctagcgagcgtactcttttattgtcacacgcaaattcaattcattttcaatttttccatacatattataacatgttaccctttgctgcatctttgtataagtctgattcagtcaaggccatgtgttcaataccccaagaagactcttttgctctacccctatcagatgaggcttattcagaattcttgcaacttcaggggaatctggacaacttaaacttgcaaccagggatgggggatgcttggatttttatctggggcacagataagtacactgctaagaaattctataagctaaattatgctgggatgcaaccccctaggcctatgatatggctatggaaaacaaaatgtgtaatgaagatcaaggtctttgcctggctaatgttctgtgatagacttaatacaagagatatgttggatatgagacattgtgccaaagaagatgattatctcacatgtgttttgtgcaatgctaactgtagagagataaggctgcacctcttctttttatgccctttcagcaccaggtgttggcaatacctgggaattgagtggaatagcaattgtgaatttttccaaatgatctcttttgcaagaatcaagttcgcttagaagggtttcctggaaattttctttttggcagcttggcacatctggaaacaaagaaatggcttcatatttcagaacgtacaacccacttttcaggcatggagatctctcttcgttaaagaagttcttctgcatatgtgcagaatgaatgagcctttaaagcaaattgtttctaattgggtacaaaccttatagtatctttgtgtgaaccacatgtaatttttgtaaccttgtaaatattttcttgctctataaaattacactgctaggcaaagccctggcagttttcctggtcaaaaaaaaaagatgttaccctttgagcattcgcacgggggctatttctatttaatattctgtccggagtattgattttaggaaagttctattcaacgctgttgaggactccatgtctctacggtcttacagtacgacaaatgttgacaagagaaatcgcggatgacaacatgagttcatttaagttgaaggctctatcgtagactctacaccctcttgataaggaacgtggaatgaagcgatggtgtacccaccgagatggaatttattgacttcaatccaaattctcgattacggcaagatgggagacttagtcgcatgttccgtaccttgtcggtcgacatcggagattaacctagacaaacccaatatagtgtttgcggtagtcgataaggggaatctagcgctatctctgatctcaccaagaacggtcaagtgagcacgacaacagtttttcaaagggcttcagtcgagaacatgaactcgttcatttgcattgaagtcgggggctactgtcatgggttatggataccacatacctaatagtagttgactaagctcgacagggcccaccaggtactaagtattatacggaatcatacctcatatatagaaggagttccggataaggaaggacgaatagagttctatatggaaacgataaggactacccgaattgtatccatattggtctccattattatacttggacaaggggacatctatgggtataaatagaagacaacctagggggagaggggaaaacaacaacaataacagatagacacacaatacacaagctaacacacgccgccggatatcgacatcagagataagcctagacaaacccaatatggtgtctgcggaggccaagaagagggatctagcactacctctgatctcaccgagtgcggattcgaggaggaagactacccagttgtcgactacatgttggttatctatgccgccaagttgacgacagctagatgggttatcccaaatattgtacttgtgtgattaagatgaataagagcaacaacggctttggccaacaggagtagggctattatctatcagataaggggccggaacctgtataaaaattcttgtctctatctcttttacttcaatcttgcatatacctgagtaccaacgatccccatactatccaaaatacggtctatttggatctatttgggtcccatcgggaaacccttgtattattaatgtaatgaaaaacctgtgtaacgatgtcagctttgtgacctacaacttaccatgtgtgtatcatctactgatctagggaatgatattgtacacacatggggtttccggtgtacaaaaccacgcggggggcccacaatatcaaatataagtcaaatttatcacaaaatctaaaacctattagagtgtagggtcaaataaacagggacaaaaatgtcattttgaccgtgagttaacaccgtgaggttggtttcgtagaacaaggtgagctcatgaccgtttttgaattagagggtcaatgtaaatctgaaaaaatagggctaaattggtagttagctttcaaaatgagttcaatatgcaatttcctcaacaagttttgtagatgtgtatgtcagattgagggtagaaggcaatgcgcggtttctatatagcacaaggtaatatattaggttgatactagcatgatatttggataactacgtttatctaacttgtgcagattgctcaggcaattgctttatctaaggccttaaagcaagtttaatagtatagccaactgcgggctccaaatcatctatagtcaacttaacagccaattcatacaatagttacctatcaatatatactacataattaatatatggtcccatctgtcctacacacatataccttggagtccgtgctgcagctggctacaaatctatagcccactgtccttctctctcctcttttatctcctcgaaatatgtttatatagcttgctgataacctactatcactagtacatatgtgattatgctggacggcggctcattttggttccaggcgggccataagtggctctgcctggaaccaggcgaatgctggggtagggtagtg

SEQ ID NO: 51577 - DNA, 3786 bp, Oryza sativa
ctcctcccctcacgcaaaacaaagctcgtattattgcatgattaattaagtattaactatttttttaaaaaaatgaattaatatgattttttaaaacaactttcaaaagtttttacataaatcacaccgtttagcagtttgaaaagcatgcgtgtgcaaaacgagagagatgggttgagaaaatagggggagagggaacacaacctaagcatatatttagttattttagttattcagtccaagtagtgctcttatgatattctttattatcgaacaagtacattactttgagatttagcgagaaagccaacagtaaaaacgggagataactcgttggagcgtggtgtaatagtataaatgtggggtctaaatgttagtggtagaggtgagatatggacatcagtattactagtatagagggcttgttcggtaggcctaaatatggccgcaatacagctagccgtaacagtattgcacatataatctcatttgctactaaggcagcagctgcagcagcagcacagctgcagcaagaattgcagccgaacaggcccagatttgttggcttgttgaaacggattattcgctccacgcttaaaaatatacacttttagtttttaatatattattggttagatttatttattaacatatttaatttaattttcctctacaataagtagatatctgtagcaacaatctatccagtaatctctttcgagcaagagtctaaaatccattcccctctctcgatctctgctctttccaccttcctatatatctctttgcatcagctagtgaaaaccacgtagctatcccacttgcatccctacacggcagcaggaagatcgagctatgtgaacgaggtcacgctgtcagcatcgtcgatccattcgatctgcaatacatgaatgtattcgattgtagccggctgtgacaattttaagaggatttatggaagcaatcatgccatcgtgtccggcatggagaaaatattggggatcgatcgatcgatgcatatatatcctgtagtgtgttcaaggacagtttgatggaaccacgccgcgctctgctctgtcggttagtactccagctaacacatgctcttcttcatcattcatcaattctctctttttccaaagttcaacatggaaacgcaaccagtcattttagatctaagagcgagtacaatatcgagataaagttagctgtaaccacacgtagagaagagaagagagagaaggaaatcgggctacagacttgtagccagctgcaccacggactctaatagtgtataagaggtgggaccatatattaatgatataatagtatatgattatagataattattgtatgaatgagctattagattggttataaatgaattggagctattagagcaagtttaatagtatagccaactgctgactgcaaatcatctatagtcaagttaatagccaattcatacaatagttatctataaacatatactacacaatcaatatctggtcccatctgtcatacacacatgcgtattggagtccgtactgcagctggctacaaatctatagcccactgctgttatctttcatcttttatctatttaaaatatacttatagctggcttatattctgcaattgtacctgctcttagttgtctattaaacttgctcttgccaccagtcgagctgaaaaggccagggatagcgaaatttcattgacgatgttagacatgaaaattggtcatcgactcatcgtaattcaagcttgttttgtcaatgatccgagtaatgtgtgcttgagaaaaaaaatatataccagtgattcagacgtacggacgaatgcagataattacctcacctgaaccaaaattttttgaaaagacacgaaatatatgaatcaacatatacgcgtattggtactaattgctagtaagtactcgtactatatatattacagtatactttcagcgagcccaatttttctagagtaggtacaatagcaaactagccagttataaacatatatattttaataagataaaagatgagagagaaaagtagcgggctacagatctgtagccaactatagcacggactctaatatgtaatgtgtgtatgataagtgggaccatatattaattgtatagtaagcaacttattatatgaattgattattagatcggctatagatgaattagagctaggaatgggctataatattaaacttgctctttggctgctgctacgtaggactggcgtacgtgtcacccagaatatcaccaccgtttcaatcatattcataatgcacgatgattcttttccgagaaagaaactgctgaattgtttgtataaaaataaccttcattagtccaccattagtttcttcactggatcagttcacgacttcacgtacagacatccattcaatgattgcagccgaaagcatcaacaagtgattaattatgatggttgaaaattaaagctacctaccctcaagtcttaacctttgactcgtgattcgtgaatatccccatcatgcatccgtgctcgtgtgcaacaaacagagtagtacttcctccatctactgagagcaaatacaatagcaggctataaatcaactataaacatattttaaagagataaaagaaataaaataagagcagcgggctacagatctgtagccagctgcaacacggactccaagacgtaaagtgtgtataacaggtgggaccatgcattaatagtatagtaagcaactattgtatgaattgactattacattggctatagatgatttggagctagtagtggcctatactattaaacttggtctatggcattaattatattgccgtgtagaacttttagtttatgtggcactattaattaagagagagagtgaagagaggaagaaattgggtctcatgcaagacacagtttcaacacgagaacctatgcactaaacactatcaagttttacattgggagagaatagtgtcttcataatagatgaagaataaatatgattggtagagaagagagatgatgtatttatcaatgacccactttaagaaatcatgggttgtggagtttagtttctattgtgatgtcttattgacattgcaccatagacactgcttatgtacactatgagttgggactgccctgatagttatattttatcttggcacatagaccaagaataagtaattctatcattcatttaatgttcctagttattcctcgtaaacaaacgattcattaatatttacatttctcgaagtccatgtagccaatcttacgtggaaaaatggagaatcacgcattaaatccgagaaagttattaagatgataggttgttggattgaaatatgcctataaaaataatttttttagatttgaaaatatacctatcgaaaatagatggagggtgtaagaaatactgctgacgagataagataatcttttattttggtgagatgcatggagatgcgataaatatccaaatctagtgtttagtggagattaatgatctgccttttgcttcctaaaaaaaagaaaaaaagaaaaagatctgccttttgctaatgctggacgcttaactgcagattgtggcattctgctaaaggaataatatttatttattgatgggaccaccgtaaatacgtgaagctgaaggggcactatatattactggatttttcacattttggtccttttgaaaaacttatttcgcaaatagacccctgaaaaaacttatcccacaaatggtcctttttggggc

SEQ ID NO: 51578 - DNA, 749 bp, Oryza sativa
gaggagagagatgtgcaacttttttatttttattttatttttttgatatttttttcacacttaggaactcacagaaaccaaccatgtaaaaaataaactcaaacggacgaaatatgtggcatatggaattttccaaagctccaccgaaaaacttttctcctcgaaaacacaatcttgcaagcggaatttggaggttttaatatcgccgaacccggcaaagctggggagaatcggatgtaactttttctgtatattttgaatttggatatctggggagaatcggatgtaactttttctgtatatcttgcttgctctttttctgtatattttgaatcttgcaagcggaatttggaggttttaatatgtcattttatgtggttatattttgaattagattaattaatttcatacagtggtagagtgcattatgtttaacatgctgatcaaagggttttactaaaagagttacggtctaattttattgaaggtgcaaagtagactaagtggtatgctagatattttcagacttagctaagtggtagtttgagtttaatttttttttgtggttggttgtatcgtgatcctgagtgtgaaaaaacatccgaaaaaataaaataaaaatgacaccgttgcaactccatatagggaaacaggaatggaggcggcggcgccagccatgctggcgccctcctcctgccacatcggttcgcgtgtgccacggtggcaggaggacggcgccagataggcag

SEQ ID NO: 51579 - DNA, 3645 bp, Oryza sativa
gtatgagagatactaaacacaatgttgacatatttaggaatgattgggattttaccttttggtagttctataatgtcagttaacacattatagtgttgtagaaaccatattcgaagctacttgaaaatacttgatcacttaatgtttaataagcctccgaatcctaatattttaaccttttctttctggtcaggattgaggtcttttatgtttgcattgaagtcacccggactgcattttgagcccaccctatgctgcagaaatgctatctttcatcacacatgacaaggatttaaagtataaattgtactatactatgttactcctcatactatggcatacagtgagggggcagaaattgatgtattgcaaatggatgtctattggctagggtattttgcttactcagtgacatcagatcaaatgaatgcaagatagttcctaatagtgacccattatccactggtttccttatagcagttttataagcatgaaatcaataggaaatgataacaaatacatatattgacttaaaacataccgttatgataggagagccggcataatcccctttttgtctcttcttcttgggtgatttggacccagaagttgaattctttttaccttttttggtttttttttggggggagggcagtaggttatggggatcgcatagttttcttccctttcgaagtgtgcacactgatatgtagatcactttgcaggttaaccgaaaatagtcacaaaaaatgaggtcagctagccaaattcagtattggacaacatcagaaaacaactacttcatagtacactgttcaatttctagattttttaatgaaaatttgtggattacaactccaaaacattgccaaaattgaatcagttgtagttttattagctagtacatggacctgaatccaataggcaaacacaatcaatgttagcaaaaatgtatgttattaactaacatttgcctagtgatatatgtcgcaggtactcaaaatatgtattattgtcattttcgtcatccatgtcagcctcattttcatcaccagccctcccagcttcagtagtaaccggttcacatgagaccaacgaagaagatggaggtgtgaacatatgacctttcagttgattagaagcacatgactgacttgctgtcgcagattcgcttgccacacctgggtctggcaatgagccggcgagcaccatcgatctggtcatcggtgccatagacatcctggagaagaggaagatggcagcccgtcgtctgtcccataaaaaaccaacctagtaccggatgtgatatatcttagtactgcgaatgtggacatatatatgtccagattattagtactaggatatgtcacatctagtcctagattcattttttatgggacggagggagtatatatctcaaatttcgatagtgttgagtgctagtaccgacaaaggccactgatgaaaggagggggaatgagacggaggagcatatatacgtaaaacgaggtgaacctttaacaaaggatcacttgagtttaaattcttcaaacctgaaaaatggattattaggatttgttaaagcaaccacattcaacatttgtcgaagcgcgaaaaacaagtgctctacatcagaaccaaagcagcctaatttgacaattttagtaatgctcaagtgctctacatccaacttttcttcttgctaggtatttctaactctatacatccataggaatgagtgtgctctgcagtattgatctccgacgtggattactgacgtataggtgatatgtgcatgtgtgcattaataggagtatagcgcgcagtggtgtgtgtggatgctgaaaagtactacatatttaattaacttgataaagacgatattcatgtaataatgtaatatagtaatggaatagatagaaagtaatgtcgaaaattaactaacttatttttgtagtaaatgttttgtgcaaattattgattaacatgattttactaaatgtcttagggaatttaataactttttattttgtattgtgtcacgtcgaaaaaccacctcctgattgcatgccagtttattgggtagaaatgaaaccacctcttgatagcacatcggtttatgggcagataagcgtgtgcatgcatacaacagattgcattccgttgaagaatgccaccaattatggcaacttccgctccacgggccaaatatctagagccatttgttcgcctttaaatttgcctcgcgttagacctgtagattcatttcacaacccaaacgatacacgtcaaggcgtcaacaatgaagccttcctccggcgactcgaatggtggcacctcctccaagcgatagcagacaaatgtggcgagccaacaaaatggagaatcactagatggttttattgaagatgaggtaatcttgcaatgaaccatggcaacattgttcttgttgtgaattctgtgcatgtttctcccgatttacttaattttgtgagtcattgaaatgaatttgtgcttatttacataattcttgtcatgaatcacatgcatgtttctcccgatttacttaattttgtgagtcattatatgtgtttgcgttgatttacattattcttgtcgtgaatcacatgcatgtttctcctgatttacttaattttgtgagtctttaaatgtctttgtgttgatttacataattcttttcgtgaaccacatgcatgtttctcctaatttacttaattttgtgagtcattcgaatgtgtttgtgttgatttacataattcttgttgtgagtcacatgcatgtttctcctgatttattaattttgttactcactgaaatgtgtttgatttacataattatgtgagttattgaaatatttttttccttccgacatctattttagatccttgctacgcggaatggtgcaatgacggttgtgtgctcccctagcagatttgtccaagcagttcaaagtttatcactagaccatcttagggagatacgatcattaggttttggcggcttattacacatgaaaaaaatcagttcttcctcgaattatgttgattaaggttgctaaaggattcaacatggaaaataatagttttttcatagagggaaagtgcatcccagtgaacctatcatatgtggagaacattatgggtctacccatctttggagaaaaaatagaagtacgcagagacggtcctatcagcaatgatttgctacatgcatatgaaacactaggagagaattgtgtaactttcaaaagtctagagactagcatcttatcctcgaaggttccagatgaccacttcaaatgacagtttgtgttatttacaataggacgactgttggcaccagcaacatattaccatgttaatgcaatgtacttggcactggttgaggatgtggaaaagatttccaaatataactggggagaattcacaatgcgtcatttattggactgcatttctactttaaaagaccatgtaaatctttagggtaatcttgcccttctgtaggtatataagtatactatccaagtgtgatcaactcaattgcaaatttgcatactaaatatttgcttaatctcactctttttcttggtttgtgcttagtccttacaattccttatttatattt

SEQ ID NO: 51580 - DNA, 1935 bp, Oryza sativa
agaatgcagaaaaaatgactgagttgtgcttgtatttgtagaggatgaagttgtagcgttgcggcagcaagtttgcaatgtctgcaaatgtaacggctataactgctactctattattttagtgcatgtgcctgaaatcactatacatatattgtattttatttctttcctgctggcagtagcactactgtattttatttctttcctgctggcagtagcactactgcttggttattgttgttatctatccccacaatggtttctactagattggatgagtgcatttattgcttattgactactttattagtacattgtggatgcccttaggacacacgaactttgtactaaagtggtgaccagatcacgtcaactaacaaaagtttcattgtttgttactctatctgtctcaaaatataaaatatgtcccatccaaccaaattcgcttatattttaggatgaagggagtatccaagtatgtcacattttatttggcacctatcacagtcacacctcactccacacagttcgtatgatttttttaactcatatccatgatgaaatgtggcaaacatggttcgaacccaagacctctatctttattcaaaaccttctttccatcttattggtatttcttaacggctttactagaaatataattcccagcaatggcacacaaatacttctggtatattatggttgcagagtttatccgcaagcacacggatataccattgtagcatttcacccgagagtattccaagggtatcgtatttattttatcccgtgggaagatcaagtagagagaactcgactaataatttatatattacttgtgataattatattctaagcaggggttaagataatccaagggtagagtgacacacaagcattaactactcattctcataatatattatctaagctaagtggaaagaaaagagaaagaaaatctattcctatacttctaatatacatagtatacatacattctagttaactgatatattcgctaataccctctatccgatgccctcctggtacttcgagaagccacccctgattgccgagttccttacgacagcccgtcatgagcatacaaccggggctaaatacggaggaataccctccccagggaattaacttaggattatataccggcgcggaggaatacccgtactgagctgtcaccatcagcggccgacctctcatccgcaatatataaccccaaataatgtaatcccgtaatctagacaccacgtctaaactaccagatactactctaatatcatcgtcatgacatagagtaattgcataagcaaacactacacccgcagcaaagcatctcaaagataagctagccgtatattcagtataacatgaacataatgtaaagtaggtactcatatactcggaaagtatttcaataccataaatgtataaagaagagtattctaataaaagtacaaagctgacaaaataaaagagaaaagctaatagagccatacccgaactcttccgaagacttccgaactcctgatttctactctattcctattccaccagctagatactacaaaactaaacttgagagaaatgagagagctattgcttgaggtgtgtgagtgaagtgaggatgagagctcctttttatagcctcccaatgacggttgtgacggttggaatggtcggtaataccctccaaccgtcattagggagccatctcagccgtccaggagaaccctggatcaaacgaagctgcggggcattcggccgaacccaattgttcggccgaaccatgggctgggccgacctggcacaatttcggcaggcagcctcctcttttgctctcatacgcagacttctgaattttggcccaattcatcgtgccaattctaagttcttggcccattcatacataagtctgattgt

SEQ ID NO: 51581 - DNA, 655 bp, Oryza sativa
aaggttgtgtctgagccgttttttccttttgaggaatcttgacttgaaataatgtcactcgtgctcaaccccaccctcgggggctcggtcggtcagctaaaatcgccaaacggggcccagaaccgagccgtgccccggggcgtggtgaactccgggggggaatcggcaaaaacccacaatcgggtcacccatacccctcggtcaccacgttcccggcctggccagtctcgacatgtggatctccccaggcactggccccgacccgagccattcgaggactgggacttgggcacgagcccttatttcaagctaaggcgcaaaaggaccatggcacagatcatcctcatcgcatatgtatagcaaaataaaactaacacaaaaattttttcatcatttcgtttctgattgcagattgagttaatttatacaaaaaagaggcatgaaggccttagaagaaagaaaaagaaaaaaagtaaagattggcgggggctcgggggctcattccgatgcgcccgggtagccggcctcgtcgccaccgtcatcctcaccgctggcgtcgccctcctcgtcggagctggagacgaacgcgagccgaggggccgacccctcgaagccgttgacgatgtggtcgggagcattcccgacccgcgcgcgc

SEQ ID NO: 51582 - DNA, 742 bp, Oryza sativa
cctaatgggcaaccgagctctgataccaactgatgagggatgttaggtcccgatcttccgataggtattgataaacagtcgatttgggcggagtcgcgacacaactcgatccggcttctgaacgaacacgctactgagccccgcaattgtagcaccacgtctcctctggttatcaaccgtgccgaaacccggttgacctcgccgagaaggctaatccctgcatgcgaatcgaagaacacaagcaagaacaagatagattgccaccaaattgcatatgaatgattaagcacacgaatttggggttccacaaaccgatctagcggcgaaactgttcttgacagattaatttaagctaaacccgactctaaacgatgacggctactgaataaatgtgattagggacgtcctagggttgccctagggcgcacatagggatggcaacagggctgcacccgccgggtttcattaccccgtccccgcccccgagttgatggaaatcccccgttcccagtccccatcccgtgctcggggaaggtttcctcccgtccccgtctccgcatcgggtacggggcacccgcgggttctcgcacccgaccacaaacatcaaaatacatagagcaattgaatatgaacatatgataaagagttcacagttcacaccaaagaaatgaagcaagagtaaagaacttcaaaattcaatgtagatgtgcattaaaaacataaacttgatgcactagtgatt

SEQ ID NO: 51583 - DNA, 3922 bp, Oryza sativa
agatagtaatgctgaataaaaatcccaagtcacttgcccttagttgctggtctacttgtgtcctagatagtagtggttacaattatggctcaagaaataaaatgacactagtaagcagcaaagaaagacttgcaggcaagcttcggcgagtttcagcaaaaactacaaaaccaaactggcagataagctcaacggagcgcgtcgtgagctcaatgcactagtggaaatcaacttttcttttttttttcttttatttttttatattttttcttttttcagaacatgaaaataggcacacctccaagttacagctcaatcggagtagatatgtggcatatggatttttctgaaaccactataaacaaggtgcaggaacttgtgagctcgaacagacaattttgcaagccaaattttggaattttggattcgccaaacccaccgaagggttatcttcggtcaattcccattgactcggaaagaatttggacgtagaccaaaaccattcgaaatgttatcttcttagctttccatacatataaagaacgccccaatccgagcacgtatgcgacctaggcgcccgttttagtgcagactggtcctggactccgaattgcacccgacgtcgacttggtttgggcctccaccttgacttggacgtcctcgatgatcctccatggctctaagtccttctccaagtgtccccttatcccctccattgttcctaatcacaacataatcattaggtagcaatctattttcgaattcatacaaagaagaacataggaacgagctcacctctaaatttaattgtcgcgcacgagctcttgttatcggtccttgaatgaccgttggaggattgttgtgtgtatccgaattagtgatgtccgcatcatacacaaccatcaaaaatcataaacaacagaattatataactcaatgagatctacaactattgtattggtcctttgtacaaataaattcatttgaacaattcaaattttgaattttcaaaatttgacaacttcgaacaaaaattaggattaataaatgattcgaaatgggaaagttatcaaaaccaaagttgtagagctcatcgaggtgcaaaatttttattttggtcatttctccatctgactctatttaaacaaattgaaatttgaaattcaaagtttgagaaattaaaatataattttttgttagtgaacgactttaactgaaaaagtcatcaacaacaaagttgtataactcatcaagatctataacttttattttggtcatttttctatataatatttttttgaaccatttgaatttgaatttgaaaatatgacaacttcaaacaacattttcaaatactaaatgattttaactgaaaaagttatcaacaacaaagttgaataactcatcaatatctataacttttatttcggtcatttttctatataatattttttgaaccgtttgaatttgaatttaaaaatatgacaacttcaaacaatattttcaaatactaatgatttcaactgaaaaagttatcaaaaccaaagttgtagagctcatcgaggtgcaaaatttttattttggtcatttcttcatctgataaaatattagtaatattgttcacaaattttacatataggtgttatagtttataaaaccacataagagatatatcaattttgtgaacaatgttactatcactttatcaggtgaagaaatgaccaaaataaaagttttagatcttgatgagttgttcaactttgctgtggataactttttcagttgaaatcatttagtatttgaaaatggtgttagaagttgcaatatgttcaaattcaaattcaaatgggtcaaaaaaatattatatagaaaaatgacaaaaataaaagttatagatcttgatgagtcatacaactttattgttgatgacttttccatttgatatcatttactacgcgtaaaattattttgactcataaattgaattattatactgcaagttaataatattgctatagttcaacttacaaatataaacatttcatatgtaaaatgaaaaaatactcatcggtgacgggctttaggtaatgcccgatagagattaagtcatgtcaactggggattagtatataacccgtcactgatgagtcatcggtgacgggcctcaagttggtgcacgtcacggatgatggtcatctgtgacgggctccaacttaaggcccgtttgagatatggaatgttatctcaatcgggcctaaagttggtgcccgtcatggatgatggtcatctgtgacgggccctaacttcaggcccgtttaagatatagaatgttatctcaatcgggcctaaactacggcccgtcactgataggtgtcatccgtgacggccttaagttttatgcccatataatatgtttgtgcgaccatatatcaatcgggcactttttcagcccgattgagatgacttccttgtgacggcccgctattttcaagcttgttagaggccgtcacagatagaaggatctgtactagtgtacgcacgagcctgtagctactgactatatgattttgtagtgcatgattatagttttcacttaatggtagtgcatagaaaattaggatgatctgccatttaagttgcttttaggttgtattcaacggtttaaatcatgccgatcatacagaccatcactatatcactcacgcatgttgttcaatatagtttagttattttattgacaatagtaagcttggattcatatcatcgtagttttttttattgttcctatgtgtgcgtactttaaatccatatagacccttctgcaagactgcagctatgcttaacttaatatcaggaacatctataatgtaatatggaaatagctttctgttgcaggctttgccgctccatgcttaacctcttttaccctaaaaaataaacaattttgtacatatattttggaataaatatacctccttcacatataccatatactatatatagtatacgatttgtccgctgcagttatatgtattgttcttcttagtaacattttcttgtacatatatagcattattgttttgtctatactaaaagtattttatgcttattgcagattccatatggcgcatgtacttatttcacagctatcatttggagattcaaacaaaagaatccatgcaagggtctccaggctatggaactttactgatctcaacgatgatacaaaaattttccacactgatcttgtcttactcgatgaaatagtaataatttacctgccaaatccattttcttatttgccttactataccaataattctcttgataacatgatttgtatttataatctgcaggggactagcatacatgcccaaatttatccccctataacagaaaagatgaaacctctccttaaggaagaaaaggtttactacattgactcattcactattagggctgcaaacagaacatacaggccagttgcaaacaacctaatgatcctcttcagtaaatggacaacacttgaagaacacattaatgtccctcctcatttccctagtattacattttcactgacaccatttgaagatgttccttcgcttgtcgagaagaattcattctacgttggtaataacatacttttattgtgttacaactattgttatatgcgtcttctgcaatgccatatcattttattaaatttttatgcaatgcaaacagacattatgggtgtgatcactgaagttggtgcagtcactactatacgtcctaagtccagaaacgctgagagcctaaaaaggacattacagatccgcgatgcaaggtttgtttagtacagctaaatatttacatttttattatttacttaatctttttcgctagcattcacacaaactatctcacatattcttaacactaa

SEQ ID NO: 51584 - DNA, 1164 bp, Oryza sativa
accgagccccgccaaagggtagccgcccacaatcataccaccatggaggttgtcgtcgccgtggaaacggcttgctgtccgcgaacctcctccaccactgctgcctctggccgtggaggcgccaccgccgttagatctggaggggggatgcagaggaagaggatagggggggggggcagggatgcgagaaaggtcaaaagagagaccgccgcttgttgtagagaccacccgcggcctccccttgggcgccgccgccccaccaactcccctctcaccggatccggcggaaggaagggcgccaccaccgcgcgccgcctcctctcgagcgccgccgcctgcctcctgccgcctcccctcccaccagatccggcggaagggagggcgctcccgccggcgggacctccgcccgccactgcccctcgggcgctaccaccgcccacggctcccggcacgtacagagagagggaggggatggaggacaaggaggacaaaatggagaaggagaggagctgaggagataaggtcgactcggtgaggataaggtcgatcaatttttattcgttgaggacgcacacgaatcaatcggctcggctcggtcagtttcgatgggtgttggttttttataatatattataggtgtcggtactttaaaaaccggtactatagtatattataggtgcaggttattttaaaaaaccgacacctacagactacaacattggtgccagtttttctgttgaaccggagactacaatattggtgccagttttttctgttgaaccggtgcctacagtgcttaaaggtgtcgatcttttatttttcattgtgcggaggtggaaaaggcttataggtgtcgattttaattgaaccggcacatataagactggtctctacaagggttttttatagttaaaccaacacctatgggtttcttggggatgcaccagtagcccgatagatgctggtgctagctaggctagaactgttatctatgatatcacgtaggtgcgggttttgaaacagaaggcgggacctacggggctgctagctcattcctaggagccccatagccatagatacctattctatgcgataacgagcacctataatcctacagcaaaacattggctgctatgaatgtaccgccattagcagccataaaat

SEQ ID NO: 51585 - DNA, 1701 bp, Oryza sativa
tactcagtcttgctcaatttttcccaagcccagaagaggagctccttgaagatgaaggctttggtgtctagctcgtgcctgccgtcaagtgcctgtggtcgtcgccctagtcttccgctgtttctcgtttgtctttgtgtgttctgggccttcgctgcccatgtaataaattaactatttacgcttccgcttgttaaactctgatttgtatcaacttttggtgtaccttgcctcctgggacaaggattaatgcacgcacgtaaggaatgcccgttgggttatttccggtcgtgacacaaagatatattttgtagacggtattattgtccaaaacctcaattagaatgaaaccgaagggagtaatataatttccacttaaaccattgtactactttgtactattattttcaaataatacactattttaaaataaagtttacacaattatattgtgtacctatcaaataaataatttaagatctatattaactaatttatacgtgcactcccattatttaaatcatccgatatatttttttttacattggactatcattctataataatgcattgtttcaacataaagtctacaacattatattgtgtacccactaaattaacaatttaaaatgtatatcaacgaatttacacttacactaaaaccggtggatccgttatttaaatcatcggatctattatttgctaataaataaagcatccaaagctccctttttggctcggtgcacaatgcacgtctgcacatttgccttttgcacacgtgacaaagcgtcgtgtctgaggcatgatcacgaccgctgcagcgctaccgctttgctacatgtcaaatcatatatggagataataaattttgttaataacatgaaaagaaaattaaaggtgtgatgcagcgagagaagaattaagcaccgtgggttgtgtttttggaacacttagttccatttaagctgaaccaagagttgattacataataattataatgtattatgttatgtcgtatttgaattttgtactatttgttcgtacaggtgaaagaaatcattatattataaatatgagcacaatattaaagaatatcaatagaactcttctaagacaagggagtttaagaccctctttttttttgattccatagtttggattttcgtttgcacgcttttcaagtttctaaatggtgtcttttttaaaacaatagtttaacttttagaagtcaattcattcgtttataccctcaaatagcaatcgcataaatcagataattcatcaatttcagttgtcctaaacccgcgactcatggtggacaattggggatcgacggatactcaaagtcataatatgaatatgtaagagctactatgaataactgtaaataggtgtcaaaattaattgctattaattagacatctaatggcttgcttgccatataattactttctctctacgtgtatataaacatcgacgaagctggaacaaatattaccatatgccccatacatatatattaagcggttaatattgtaattacatgtgttaagtcctttaaaatttcttaaaatgctctcaagctatcacgtggtgctctaataaattagagcaaatattagaaattctatcaaaaaaagcaaagcatatattacttgattttcacttaaatcggtacgtccaatattataaaccgttcga

SEQ ID NO: 51586 - DNA, 1187 bp, Oryza sativa
gactacaatattggtgccagttttttttgttgaaccggtgcctacagtgctaaaaggtgtcgatcttttatttttcattgtgcgaaggtgggaaaggcttataggtgtcgattttaattgaaccggcacatataagacgggtctctacacgggttttttatagtgtaggtgttggtttaaccaacacctatgggatgcgagaaaggtcaaaagagagaccaccgcttgtcgtagagaccacccgcggcctccccttgggcgccgctgcccaaccaactcccctctcaccggatccggcggaaggaagggcgccaccaccgcgcgccgcctcctctcgagcgccgccgcctgcctcctgccgcctcccctcccaccagatccggcggaagggagggcgctcccgctggcgggacctccgcctgccactgcccctcgggcgctaccaccgcccacggctcccggcacgtacagagagagggaggggatggaggacaaggaggacaaaatggagaaggagaggagctgaggagataaggtcgactcggtgaggataaggtcgatcaatttttattcgttgaggacgcgcacgaatcaatcggcttggctcggtcagtttcgatgggtgttggttttttataatatatgataggtgtcggtactttaaaaaccggtactatagtatattataggtgcaggttattttaaaaaaccgacacctacagactacaacattggtgccagtttttctgttgaaccggagactacaatattggtgccagttttttctgttgaaccggtgcctacagtgcttaaaggtgtcgatcttttatttttcattgtgcggaggtgggaaaggcttataggtgtcgattttaattgaaccggcacatataagactggtctctacacgggttttttatagtgtaggtgttggtttaaccaacacctatgggatgcgagaaaggtcaaaagagagaccaccgcttgtcgtagagaccacccgcggcctccccttgggcgccgctgcccaaccaactcccctctcaccggatccggcggaaggaagggcgccaccaccgcgcgccgcctcctctcgagcgccgccgcctgcctcctgccgcctcccctcccaccagatccggcggaagggagggcgctcccgctggcgggacctccgcctgccactg

SEQ ID NO: 51587 - DNA, 872 bp, Oryza sativa
caattttgggtccagttttgcatcttgtcggttgttgccgggaccttgaaaaattgaatcgtctcgtcatcgggtttccgtttttgtgatttggagaaatttttatcaaacggttttggagttgccgtactgtgcgcgtgcggggagtactgtacggttgaagagagactccagattagatcagatctatctgtgactatctgtattatcctctttatagaattgttaagcagcggatctgagatatttttataaaaacggaacctacatgatatgagcaattcatttttgagatgatccaattttagttttgcactttgcgtttgagtccctgtaatattcatatttacatttgagtccctgttggaggtcagtggtcagtttttgttgaaaaaaaagtaaaaaaaaggaataaagaaagaaagaaaacgcagaaaggtgcaaagaaaaaaaaaagaaaaaagccgcacctaaaaaaaataaaaaaaggggcagaaaggtgcttaaaaaaagccgcaccaagaaaaaaaatcattcatcctttgagtatgttatcagagtgcagagttgtgcattgattcatatctagtctttagaggtgtcgggtgcttgcttgagctagagttgagtctaggctaggccagcacattgactagtactttgaactattattcaactttgtattttcttattagcacaattgtgttcctttgctgctatatattgtgcctttcaagctccacatatatacttctggtcaacaccgctttgatccttgcaatcgccacatcacgtccttcaaggtgtcacgaaccagccaccggttgtaccatccttagcattgctggtaagacacttgtaagaacttggta

SEQ ID NO: 51588 - DNA, 6425 bp, Oryza sativa
taccagcacgttaattcttgtgttggcgaatgccatagtaaatactacttggtttagccaactgctgtaattattgtttaagcaatttgttccttgtttgtggcaataatgatctcttctattctgaataaatattcaattgtatacagccaagttgatcagatttcagaagcaaagttacctgaaaaataaaatgcttcgatttgctccccttagcctgcagccacgatgctttgatcttgtaagataatgaagacgaataactaatcttggggatcatgaattgatgccattctgaatagaacgaataaataaataaaaatattcagttgtgcagtccgatttgattcagaactagagtagagttacctgataacctcgcctgaggtcgcaatgctttggagctggagcgccccgtgtcctctcccaccccatgacgcggcggcgtctcttcctcccgccgccgattcaaactgcgaccgccgccaccaatcccgactgccaagaaatgctagtcctccggcgatctccgccgccgccacctgaggcacgccaccggacccatgtccgtggcttcgtcttggaagggccggaccggggggccgctttccgccggcggcgactccgcctctccacgccgccgcggtgtgtggccggcgatgtgggcgagagactccattccgtcacccgagcggattacgagaatagcctgggcgtattctagttttcaaaacgtaatctaatttgacgctttcaacaggcccaacgaaaatgggcctcaatgacgagccatgggcaatttggggcctcatcggttactaacggtttatttattagcgataaaaataatttatacgaaaatttttatatacatgtattcttagcgaattaaagtcaataaaaaactatgttaaaatattttaaaatcatcttctaaattgaattttaaaatataaatttggcataatttgtcttaattctttttaggtgttgttcttttttcttgaagatgaagttttttatgcaaaacgaggtggtataaacgtatgattgattaagttttaattattacaaacttgaaaaatagattaatataatattttagagcaactttcatatagaaaattttcgcacaaaacgaaccgtttagcagtttaaaaagtgtgccacgaaaatcttaatattcatccagcccttgttagagaaaagaacgggaccttagtacaaccgatggggctcctgaagttatcaagacttctaaactccacggtaggacaatgtcaatgtggagtactggagtccaagagcctcatccgttccatcctgaaaagcaacttcaaatcggatcagtttaacaaaccccattgagtaatttttgattcagtaaaacattttaacttgctgcaaatagctttgagttcccacttccaatttgctgcagctgatgcaaatgcctctctcagaacttaccagtggtggttgcaacaattcacccaaattatcagtcagattatgcttgctgtagctgattcctatttaacaattcacacctcctacctaaaatatgtgattagagagcacgtagactactgctactgcttgattagttgcgactatgctaaatgttctagaaaggcatcacctgtcctctcccaggataagttactttttggtccgtttaaatttctagaatttttatggttttcttcctaattaacttcttcaaactgtgctagaactatgtatttgagatggcacttcacacatctcccatctgagtgagacatgtttaacgcggttggttatgagagtttctgattaagttcacattgaaaaccacatcgattctcaacgtgattctaatagaaaggttgcactaatactccacatattgtaagcttgtattctcgccgttacacaaaatgaaatctaaatttatgtataaatactaagaaaaaaattgagaagtaaaaatatattaaacatacatttttaataacttaactcaaaattcaggtattaatatgatatgataacttccactcctcctaaaattcaggtattaatatgaacatctagatctccttaacgggataaaggaacaacttccaccccttcagaattagagtacgtctgattcaggtattaatatgaccatctagatctaacaacttccacttccacttccactcctccttaacgggataaaggaacaacttccaccccttcagaattagagtaagtctgattagagtgataatgtcctcccaattgaaacatggtgctactttgcatttctccaatgtctccaaacaactaaataactatttacattgtctgaaaaacaactaaataattattgatctcattagttgattgatcctttatgtttacttatttacttcgatttactatttatatataagcataggctgaacagaaattaaacgctgcaatatagtttcagcgagaggtcatccagattttgttcttccatatcatcccgattgcatgtaagtggccgagatgacctttcagaaagagtagagagatggacacgactagaaatgattatattcttggtcatgcatatatgatgggcaacggtttttccaaacaaaaaatgctactgtgtccttcactttttcgcaatacttagcactaagctgttgagatgattcctgtcatgttataagtgttttactgaaccttacgatctcctggcagcatggattagcaggcttgcagcacctgattctaacttacaaatccaccttctcatattgaaaattagactgcattaatcatagaggagtagtttcccgcgtcgactttttatttcagtgtttaatcaactagtacaatacatgtcaaagttaggtactaaaactttacacatatatgcggagtggattttgatccctcgatgggatatcccctcgttgtttgcatgtcactcaaattgttatgaaaaaatttaagaagatgtattaacatgtgatatatcactccacaaacatgcaagtttaaattcaacttctacatcttgcaacgaaaaaaaaaacaaattaatggataaacaaattcaacttcataaatatagaaatttacgtaccatttcagaaaaaataaaaaaaatatatggcaaaatttatcccaaaacaacaaaatttgtgtaattggctaggagacatcgtaaaatcgtgtcgctgctgatggacaccacaaaattcgtatgatttgttataggacactcgagacatattttatcatttccaggcaaaaataggagagataaaattcaaaaaacacaattgtccagccctatctaacccccattggcacgaatggtggcggtagcggcggtggcttggacggcagctagctagcctggtggcgtttgcgatggtggtcagcaagttcggcagtggcaacagctttgacggcgacgataagccctgcgacagcttcaacggcaattggcaagctccacgacgacagctttgacggtgactagcaaacctggcggcgatggctggcaaacccagtgtcggtggcttcgacggtgactggtaagcccacaacggcttcaacgacagctggcaagcccggtggcggcggcttcgactgtggctggcagcggctttgacaacggcaggtgagccctgcggcggcggcttctatggcggttagcgagcggcactgtaaagcaggtgatgtcaccgaggatgaagtcacctgtcacctgtggggattagatagggtttagggcgattttgtcttttttaaatttctttcttctcttttttacccagaaatgataaaatattgccttgatgtcctataacaaattatatgattttgtggtgttcatcagtaataacgctgccactttaacaaattttgggtgttttgtggtaaattttgcaaaaaaaaaaatcgtttctaaccatttctgatccttttcatccctatttggatgagtctcatatgcaagctgcaatagggaaagaaacaaaactacaatttagtttcaccaagagctcatcgaatttgtgcagctttgtttcttccatgtcaatccatttcgtaggccgctctctgtttaggggagagagagagagaggggacaggaggcaagaacataagagattgttcatgtatatgttgtgatgtgcttgttatttatttatagatctcgcaccgtgatctaatttcattcgtttcttcatcagaagactcgtttgttttagtgtgctctactccaggtagttggtaccaggttgattaatgagcagtgagtaacttacggaagtaagaggaccaaattcgaatccatggctcgtaattcaaactaagaaattcacatcaagctcttgatcactaccagaagtataatatgcatatggagacagaaaaagaaattatcagaagtggatatatatcttagaatttgcgccatatatgaatgtttaggttgcaggttatatttttgcacattgcagcatcgtgcacgggtagaaaagagagatgtaaatcaaagaaaagaaccaccattgttttgttctcattctaaattcaaaagggaaaaatatttgaatatgagggaaagcaagtatagttgccttatgtctcagatgtatattggcataatcctgctaatatgtttgttatactcttattctcttcttaactagtgtaaaagggaaaaatatttgaatatgagggaaagcaagtatagttgccttatgtctcatatgtatattgccataatcccgctaatatgtttgttatactcttattctcttcttaactagtgtaaacaaattttaaaaaactagaacacaaccctaacataataactgtttttattatgccaacctaacataataactcttactatgcatggcaagaaatagatcagttcaaaaacagaaaataaactggttttattgcttctgattcgacttttttggattagacaagagagaatttgaagccacactagcccacaccaagttacactagaattgagtagaaaaacagttagaaaaataataatgttacatttggttttctccaatccctcgaaaaacttaacgtatatttatttgcttccatgtactatagtaccatgccatttatatgcctaggtcgaacaggctgcatatgtatctatctaaatattaaagtttcagtaaggtcatcaacgttgtgcagcttgatttcttccatgtcagcccatatgcatgtttaaaccacagagatcgagtcatgcacttgttatatatttccaaacgttctagtgtgatttaatttcatctatccgtagttcagacttcagaagcctcatttttagtgtgctgcactccagatagtcagatcaggtacctggtacaggttgatttctattattaattagtgactacttgttgtgccgcatatagtacgagcatcaaattcaaatccatggctagtaatccaaagtaagaaatttacagtgctcctgatcactgttagaagtataatctataaattacaagtggaggaaaaaattcagaggaagatatacacctcagaactcatacccaatttcagagttcatacactaattgtctgggatattcaggcatcggtgttaattggagtcggacaatgactatttgtggaaatgaaattttctttctgatccaatacaaataatgtggtatacattggaaaaacaacggaaccttaaaatttcgaaacttcggtaaccatagtgtgggttggctttatatgtgctcagaatttaggagctgattaattagctgaagctttcatcgttttccccttaactaagtcagccttacatagagcatcagtggttccaacttccaagacaacttcatgtgtagggagctgggaagaacctatatatcaaagtgaaattataagtactaaaaagatcatgcaaaagtaaaagagaattcacaattcattcagccatgataagaatgtaagattgtgctacagctaatgcaaagaatcatcagataagttcatagaataactcttgacacaacacacaacatagcggaaggaagagaactgattgattagtcaccacaccacagtgccacacacgtagtctaaagtctagcaaattcaggtcaaggatatcaaatttagtcaagagttgacttcaactacatacaagaaaagaaaaccttaacatcacctttgaaatcactcaaataaacatcaactttcttgccggctaaggaaccaaaatgtctgatttactaagcttttaaacacaaaatgatgtagtagtacttaccaaccgcaccagctgagcttttcaatccaggtgaatgaataaatttttcacattaagggaaatgtacggggtaattgttgcctgcatagcgggctgcaggaat

SEQ ID NO: 51589 - DNA, 1247 bp, Oryza sativa
gacttttctagtatatgaaaatgttgtttgaagttgtcatattttcaaattcaaattcaaactgttcaaaaaaacgttatatagaaaaatgaccaaaataaaagttatagatctcgatgagttatacaactttgttgttgatgacttttttagttcaaatcatttagtatttgaaaatattgttttgaagttgtcatattttcaaattcaaattcaaactattcaaaaaaatgttatatagaaaaataaccaaaataaaaataaaagttataaatattggtatgttatacaactttgttgttgataatttttttatttgaaattatttagtatttaaaaatattgtttgaaattgtcatattttcaaattcaaactcaaactgttaaaaaaagttatatagaaaatgacctaagtaaaagttatctctaacgggcatcaacaaaagctcgacaccgatatgagtcatcggtgacggttttaaagtcatctcaatcgggccatatttggagcccgtcaccgatgaccctcgtctctgacgggctcggtgtctaggcccgattgagatatgcgaggtcatctcaatcgggcctaaatctttgcccgtcacagatgagtgttatcagtgacgggctatatgtacttgggcctaaagtgagtacatctacaacggtgcaaatttaagcccgattgagatgacttcgttctgacggcccaagtagtataggcataattgagcccgtcacaaatgataggatctgtactagtccgtgagttgcactgcagtcccttttcgtcggaaacaaattcctgtagctgtctcttttcgacagaaaaaaaaatcttccaacttcgttttcgtcacaatgctcaaattatcatactaatctcactatcaattccatcatctaaactcttgaacaagccgtcacaatttattctcttttgcagttttcctactgttttgagttgcagaactaaggtgactaaccgtgaactaatttatagtccaaaatagatcgtaaaacctatttattttgggaaatgctataggatggtatcctgttcggacgggatgatacttttgaggtatcaactgatacaggacgagatgatatctgacaggtatcaacccatccaaatgggataccatcttgtaccattccccataataaatgggccgcatgaagtccattccgcacgtagggtgtgatcctgttattgggccgcacgtgatcgagatctcgtt

SEQ ID NO: 51590 - DNA, 725 bp, Oryza sativa
tatggacaatgaagtcttgtaatacaaaacggatgaagtattagcccatgaggatgagaatacactgtacacccctgacctgacgtcctgggggcttttaactatttgccattcttacgtatattgcttaacgatttgccactagacccatatgtgatagacacatgagggcccacatgtcatttacagggtgtggcaaatcgttaattgccatgtcacaggagtggcaaatagttaaatttcccgatgtcctgaccccaccacggctttcatcaaaaacccgccgccaccgccaccgccaccgccgccgccgccggcacattctccggcatcctccggccatttccggtgaaactcaccgccgccggaagcgtgtctctcgcggcgcgatgtctacgcatcttaccaagaacccatcgcccctgttgcatcgccatctccatctcctcctgcagccccgccgcctctgcagcagcgccaccgccggcgaactcgcctcggaatccgcatccgtcggacgggcggtttaccgggtggacgacgacctcgcggaggagtcgaggagcaggctcgtgcgcgacacctgcaggctgctcgagctccgggagtcgtggagcccgaagctggaggcccagctccgccacctcctccgcgtgctctcgccgccgcaggtccgcgccgtgctgcgcgcgcaggcgcggggggacgtccgccgcgcgttcgag

SEQ ID NO: 51591 - DNA, 2901 bp, Oryza sativa
ttttacgcataaccggtacttataattgataataggtgcaggtttgttccgaataaccaacacctttataccagtacctatttgacgttgtgtagtattgtctgttggttggttaattggtcacataatacacgtacgtaggaccctgcaaatttagtgatccctagccaagaaatttagtaccaattgattgattgcatgcatgaatctatctatacatgctaattgcaagggttggatttgacctaaatatctgtaccaacttagtgccacctgtactccatgattagcgaaaaaccaatcaattaatatggcccttgcagtacgtaccaggacacgtcctagtctcatatgtggtctcaggttcatcagctcatagctagcttagtaatatatcttagtaccaaagggcttgatagctgcagctgctacttcacatctgcataatttaatttgttccaatatgtcctggacattccaacaaaaaatatgtgtccttttggttcagcaagcatatgccattttgcatctatatatggaacatgaattagttcattgattccaattgatcagctacatgttttgtcatagtcccttttcttatgccacaattgtgcttagcaccaaatacagttctaaattagtgaacagttcagtttctgcaacaatgttcagaaaatatttctgaatctcaatgacccaaaagtccttaattaagtcgatctatatgatgctgaaaacttgattgacatgaagaaacaaatataaaccaatgttccaaaaacttcaaccaacttatatacagatatagaattcagtttctgcagcaatatttctgaaaaaaaattctgaatctaaactacgcctaattattaattaagtcctaagtcgatgctgaaattggttgagatgaagaagcaaaaacaaactgaagttcgaaaatttccaaccaacttatatacttatatacagatgcgtatggatggatcacaattcagacaaactttgatcgaaactgtgtaatcgacatgagttgcatgagagatcgaatagggtttggtagcacctaggacacgattggcacacatatgtacgtggccatggaggaaacacattaataactagtagttcttgatatttctcccttttccccaattattgatcatcgatggatagctagcattctagaatgatgatcaccagatgcgtatgtacgttccatcatatcaggcagccagggcacacaagagaacaaatcaaagggcgatcgatttgatgtgatatcaactgcatatttgcatggaatttgtgccaagtctttcggctataatgatttggttgtgtgtcttcttgaattggacccagctgctttgcaatcattcattcacaagagtccagcggctaagtcatttcaaccatcaccatgttactgcagatatgtactcctatatatgttcagaaacgagttgttaagcactagctagctactaaccaatttaatctagttttaatttgccaggagtgtgctaatggccttttgaaccatctcattcagattggatgtattggagttacccctctgtgttcactgtccataggtggtatagctagctagttagttgctctgaattatgtgaggtggccatcatggtttctagtctctctatcccaaaacaaaaatatagtgacctttagaattaatattttatcccaaatataacaacttttttacccctaactattcatagtatccttggcttcatgatggtttgtgtttgcttagctttgtttctactatcgtgaactttttgtgtgagttctgtaataattggatgtagctctttgagtaaaggtcgggatgtttcattccattatctaaaaatcacccctgccctggactcacacccaccgaccctgagaggcaaacatgtatttttactctcttctccttaatactcatgtcactacctagaaattactatattataggatagacgaaaggagtacttattaaatatttaatcatggtcttttctttttgctttttctaaaaagccggaccaatatgatctactttctagaaaatctttaatctgttttcctgccataatatatatcctgagtgtaaaaataaatcacatgatagagaaagatatgtacgttacgttgcaaaattcgattgcgctatgttatatacttatatttaaggaaaaatacatataaaaaggtcttattttgaaacaaaactaacacataaatataatggttcaaccaaaaaatatatatttgagattaatatggttgagggccaaagtatgatcaatcctttcatggatgttaggttgtgtggatatgagaggagggagtatgctcctaacttacttttcaaaccaaaagcatggttgtttttctcatgcatatatatcccaaagagagaggccatattgcttgtcctggcctgccggccaacttgtactatagagacccaatctggtctcacctctgcaaattgcactgcattacatggctaaattcaacaccaaatccagcagctccctttgctttacatgccctctccattcaggcatgcaaaaaccaccatgccattgccatccagccacaacattactattaactattaaattattcacccattcattaaaaaaacattagtattaattaggaggagagctacttgtgatgccacactccctccattcacttgcactctctagacactcacaaacacacacacaacacacaccaatcattcattccctctctcacatttgtgtacaaccacaagcctacacctacacaacaattagcatttagtagcatgcaatgcaaccacacacacacacacatatccctcctataaaagggacatctcacaccaca

SEQ ID NO: 51592 - DNA, 3136 bp, Oryza sativa
aaattttcagctagatatctcctaactaaaagacctcattaatcacaccacaacttgatcagtattacctcgcgaaaacacttgcctaacaaagtatagcgagctgaatccgtccatgaacaaaggttaagggttcaacttaatatagccgattagcctcgacggttggggcggcgacacgtgttgcgccgcagctggggccatatgcatccaccttgtgacttgacttgtgtgtagctaggtgctgaggtgataggagttggtaccatacttcagccggcgtttgctacactttttctaacagatgaagctcaatcagggagccctggccatgcctcccttgatggagacaaacatgccttgcacttgcaactctatacatatagggctacatgattcaaattgattatatacacaattcaaataagtatgaattttttttaaatgtttagatattaacattaactactttactaattagttcaaactagtttgaactgaatttgaacatgtttttattagaatttgattctaggtatataacatccaaacatataattagttaggtatataatattgaattgtgaaataaagttaaatttgagttgttttgttgctaggtataggtatgaatcaaatacttataactaggtatatactcacaatttgaaaatttttaaaaatttagacgaatttgtgtatttcataccatggtgcccgggcaccatggtgccccatatgagtgtcatacatacatacatacatacatacatacatacatacatacatatgtgtatatatatatatatatatatatatatatatatatgtatatatatatatatatatatatatatagacacacacacatttattgttcaaacaacatatgtgcacaattgtcttcctccactgggatttctagagttcatcaaatggactagtgtgtcatacaataaagaaaagatcaaaaggcattgcctaccaatgagggcattctcctaccatgcatctaaccagcatagtatagtactctggcaataagtgaaagaaacatcgtttttgacttttaaaagtgaatatatagtgttgcttttactactaaacttctagttacctcactagtgcgagaattaacagctcacggactgacaatgtaggttcgttggtttcctcgtttatttgcatgcaatttccttgtttttcttcattagcacgtatcctaagtgtaaaaacggtctgatatataaaaaaacactttttatatagaagttcctttagaaaaacaaataaactcattttacaagtttataataattaatacttaattaatcatatataaatgacttgtcttattttacgacaagtgtaacatctacagttccctgtaactgggcctttccaacaaaggaatactcctagattttatgggattctcacacagtcaattcttttgaaaattcttggaatggagtgttcaattcctataaaattcctaggagccctaagttgctaaatccatgggctcatatactccattctgaactttaatttaccttagttgcactaaattgaagtagaatatatatccttggaggcttgaatgcataaaaattgcatatgcttaatccatacgaagcctcgctagattgcaaatgaggtagtaaaattaatagtgcattttttgtcgatttaagtacaccatagacaacgccatccttttcagatgcaaaaaagacaaaatattttttttaaaacaaaacgttggtgccttccatggttcaacttgacggaggaaataaccagtgattggaagaaacaattcagccactaattaataaagtatttaaaatttaagtatatgtttaattatcatcatcatgaccatcacgttggcttgttttcctccaatcacaagtcaatggccagttgttcagtgttgctgttattggccctgttattttcatctgcttaaattgattggcagtattcataataaaaaaaaactcactatatgccatgatactatttagaaaattattccctaataaagacacgagatagatagatgaaaccgtcaagaacaacaaacgacatgatgttctaaatctccagaaaagtccggaaatattatatagttgacgtacatgtgcaagtacagattaattatgctgaaagctatggaatgcatgggcacgaagtcttatcactgattcatgaataattgttttatagctcctgttatttcaatgcataattaacttgagatttaaatcgcttcaagtgagacctcagcaactcaaagtatgcaagctctactgctctagagcaaaatataatcacaattatgaaactttataaacacgaatatatatatatatatatatatatatatatatatatatatatatatatatatatatatatatatatagtttgctcacacattaaccaaataaaaacaatgctattttcatatattaatccgtggcaccatactttgataattaaacttatagacatcttcaaataaccatacctacctccagaacaaaacatgcacttatgaacaaatcatagagaatatgcattatgtctatcattcaatgattgtgctactgattttgtcactaattaattaataagcgagcaaaaaaaagaaatgcaaaaacgtgtgcatgtttttctgacacgtggcactctccgacagaacaggaataaaaaggtaatgatgaaaaaggaggggtctggaaatgacaaaacaaaaataatcaattcgttaattgatgcagtcatcgattcagtcatcatttgtttaccaatcatcgtagtacttagttttcacaggtgaatacaaattaaaaggctttgagctggactctagctagtactactaacttcaaccctctgtgaggtacatggtgcacaaattaagtagcaaagtacgtaattgatccggtgtctgaatcttgatcgtacatagtaattgcatatacgtatatacttataaacgagagcttgaaaggtgaaatttcagaaaaatgttttattgcttacttcctccgtttcataatgtaagtcattctagcattttccatatttatatattgatgttaatctagagggctgcaggaat

SEQ ID NO: 51593 - DNA, 1405 bp, Oryza sativa
attcctgcagcccagctctaactagctactacatcccaaaattaaagcctaaaagggcacgacatattacacactgcagcaagatcataatatatacctcttccattccaaaatataagacacaaccacccttaatccaaagaccaagaaataattattatcacctctttatttgaatcaatctaactaatacaatacatgcacccaataaaattaaacatattatgagtgtatgatttaaaaaatagtaatttaggagagaagatatgttaattaattgccatgcatgcatgctttatattatgaaatacttttaaaaagtagttgtgccctgtattttggaatggatggagtatcaattctttatttccatctcaaaacattcttcatggattactgctcacagcaacaggctggtgttggtttagtattttacttctttttttttgggtgtaccatgtacacaaagtgaaatggtgaaatattggaaatcatcagcaattgttaatctttcgcatagttacggtggtcattgttagttgtgcatacatggtttttcaggcaatgattttccatgttaaactcttgactcttgttatcttgatcatctttgttatctgaccccgtcatttgtaatgatttgaagttctgatgacctgaagacagggactgatgctttatattagactctgatagatggactgatgatttcagatttcctttaccctcggttacttcatgtcttcatatcaacactttgatatatacatactccctcggtccataaatatacaagattttagccctgtatttatccacaattataaaggatcttgagatattactagtcccataaatcacctccaattcaaatttcttcgcatattattcctgaccattcctcaaccttaatttctagtaaataacctataattccttatattcgtggatggaggaagtactctatatcctctttaatgaaaaaagaattggttactgattaaaagcactgatctttgcaagcaaagactgttgtaatagtgtaatcaggctcatctgataattcctttccttgaagccagcattcagcagcaaatgcttcatggatattggatcagttcagcaacagaggaattaccagagcatgtccaaaaatatgttagtttcttccttactggtttatactgaactccggctccggcttcgttttaatttgttctctaaagtttctagtacgatcaccattaagcagatgttcttttgaatgcactgatccgagtagcagcagaagtatatatatttcagagcaatcaacatggcagagggagacctgcatttactagcggataatgtactacagaagaatcaaaacctattgctcacagatgttccatacacaatgagg

SEQ ID NO: 51594 - DNA, 3709 bp, Oryza sativa
cccgcgacgtcaccaccttgctgtgcctgtccttccgggccgccgccgcccgcgccacccggctcgtccgccacgccgccgccgtcgccgccgacgcgcccccgccgccgacgccgacgagcgcgccgcgcgggcgcttgcgctccttgccgccgacgacgacctcctccatggctgacgcttgcgctacctcatgcgaaatccgcctccgcttcgtctgctcaaatttgggggggaaaaggggataaaatttgtaaaaaaaattctttacgaaatgatagctttagaggtggcaaagattgcaaaaaaaaaaaaagatttgtgggagttcaaattgtccacaaaatcttctcagaggttgcaatttgcaaatatagtaaaatttggtagcccatttgctctcccttgatttgtaaatggattgtacattgcaatttatgaaaaagtaggagctttgtggaagaatctactaaaagcaaacataaatctgaaccttttgcggctgttcttgcagaattatttatggtgccaactttgctgtgacaactttttttgtcaaaacgaacttcaattagggctaacaacaagaagaataatcaaaacgtcgagttgattaaagaatttgtaatttgaggtcatgtatcagaagctcccatcttcccagagtcaaatctggcaagcaaatcaagaaatctctggacaaaataattccaagaaaaaatggggggaaaatagctttaactgaaactctcaaaccactatctttcatcagttcatcaccattttcctgcattacttaaaggaaacaaatctctgaagaaacaccacccaaattttcctccaaggggggaaatttttcaaaactgcatccatccaacagacgaaaatcgaattcaaccgaacagaatgcatcaaatcttgctcccaaaacacatcaacaccagaccaaaacacacacacacctgaagatcaatccaaatcgagatatttcacctcctatccttccaagaaaaaccccaaatcaatccccggctcaaattcagccgccccagagaggaatcaaagccgctcacctgaaggggatcgatcgaaaccgaggacccgggcgaactagctccagaattcgagggaccaacgagcaaaagctcactctgagctactctgaatctctctgatgctgtgagctgggcgccctgcaagctgtagctgcagctgctgctgctgctagctggtcttatcgcctctgagcaagctgagctcagcaactctctgcaagctcagcacatatatagaggagcacatttttcagaaaagacctcggattttccatacttcgtggatgtgccccgcgcacagtaccatgcaggggcttgactgcaaaaaaaaagtcaggttcacgtttcggatttattacggtcgtgctttgtaccatgtactgctctacaaccatttagccggactatttggagatgaaatgaatggattatatcgaagagatcttatgtttttaacaagtgtgaccacatgagttaggcggaaatgggtggttaaccattgtggttgatttgggtgaccatgagtcgattcgattgcaatgtaattttgtaataaatactgacatgaggtagggaaataagtagttaatcattgattttgtgttattgtttaaaacgtttttcaggttaaggaaaaataagccactatgcaagaagatgcggatgttatcgtcggagcatgaatcttgacgtgatcctacgataagtaaatttgattgaatttttttgaggatatcaggtggttgaaatcttgtgattcgcattaacaaaaaaaagaaaactattctttcttgacttgtacattactcccctggtttcatatttttttaatgttttgaataacgttttgattttaaaaatatatatttaactatctattattctaatatatttataaaataaataaatatttaattgtattaaagtgctagtttgtttttaaaagactttttagtgtctttaatctcggtattgtccaaaacgtaaaaagatttatggtgcaaccttatcttttcacttatgcttatatttatcagccaaaatttgaattttcaactttaaatttgaagttgattttgaggtttttttcatcgaagtttattttttagtctttgctttttgattgctaagaacacatatataaaagttttattcataaattatttttcgttaatgtttggcttatttctagaataagccaaaggatggagccctacggagtagattatttctttcatgagtgtttttcataccattgtggtgggggtgccaattaagcgctaattaacagcagcccgatggtgatgaatggagctagctaggctaagctagtgaaatgaagaggaagatgatgagatctggcaggtgacgtggacggtcaaccggaaacagttgacagtaggggtacggctttccactttagagacggtgtaaagaggagtagcctttcctttacaggctgtgcgtgctgtacactactgcatttgttaaatgtacctacatactactactagtccactttctacgtactagtcgtcgtagactgctacagttctactagtattactaaggggatgtttatcaaatgatgtaaaattttgacgtgtcacatcgagtattatataaggtgtcgtattgggtgttttggcactaataaaaaactaattatagaatccgtcagtaaaccgcgagacaaatttattaagcttaattaatccgtaattagcaaatgtttactgtagcaccacattgtcaaatcatggagcaattaggcttaaaagattcgtctcgcaaattagtcgcaatatgtgcaattagttattttttagcttatatttaatatttatgcaggtatttaaacgttcgatatgacaaggtgaaaaatttttgggtggaaactaaacagggcctaagctacaagccacttgcatttgggtcagcaactctgcatacagggccggtcctgggtttttggggccacggcaaaacttatatatatatatatatatatatatatatatatatatatatatatatatatatatatatatatatatatatatatatatatatatatagtcatataaacacacaacatttaatattcgatgtgataaaattatctatatataaaattttaaaacttcaaatagaaataaatagcagtagcgagcagagaaggcgatcggcggacgatcgacacgagcgtggctactagcgagccacgatttgccaacttgctgtttccgtttgcgagatgccaagaagtcaagaagttgccgagagcgcaggagcagcgagcgacgtgacgtgattgaggctgcacgatgtgagtggtgtgatgtgatcgaggcgaagcgacgggagtcagatgaagatcgcttcggcttcgctaaaacaggcctgacgatggactaaaatttattttctatattaggctatttagctgtctaacttaatatagagccatagctcatgaactaaaattatacggtacgtagtatatatactatatgtgtatatagggggcccctagattttgggggcctcgggcggccacacggcctggccggccttgtctgcatatagccaagctgcgagtatatacttgacagatgctaccaaaaaggcctccttgcaatggacaaaatttt

SEQ ID NO: 51595 - DNA, 2855 bp, Oryza sativa
cttacattgtgaaacggagaaagtagtcggtaactcggtatactctctgtccacgaatatatggggtttttgattattaaaattttatccgtagatataaggaatttggaagtattgatttttcagtccattcaaccattgtgttcgccggtgggtacatagctagacatgatctttcctaatcaagtaaacttgtagggacctggttgacaggtttttttttctcgaaaatttaaccgtcagctagcatcaaagtaatttcaccttaagaactctgctaatcaacctaaaatcttttacatccctggacaaagtgagtactcctactatatatgaagctcatttcagtgatgtactgacgtgcgcctgctgaattctctgctagctcccacagtatatatttcaaacttaagcaacacacttaattaagtacagtatatataggcgaattgaccgatctttttctagagctttaatcctctcttctccgtacgcaccgtacggggtgcagtgtacttgtctatatttgctttggaaattaagacccgactaagacgtatacggagtatgtgctagctactagtagctgcttcatcggattaattgtttagggcctggtaaaatttttcaccctgtcacatcgaatatttgaataagtattaaatataaataaaaaataactaattacatatattgcgtgtaaattgcgagacgaatcttttaaacctaattactccatgatttaacaatgtggtgctagagtaaatatttgctaatgatagattaattagacttaataaattcgtctcgcagtttacatgcggaatctgtaatttgtttcgttattagactatatttaatacttcaaatatgtatccatatatctgatgtgacatgctaaaactttacttccatagatctaaacaccacctcaatcttcatcagagctagcatgcatgttgagttgccagctgcaaatgcaattgtattatttatcaagtggtcaattggtcatccaaacaaaaaatgctttcagattagggaagctactccctccatcccataatataaaaaaaatttcggtgaatgtgacgcatcatagtataatgaattttaataaacttgtactaggatgtgtcatacatccatctaaaatctcttatattatgggacagatggagtagaatgctagctactcccttcaggaaaaagagtatatacgaagttacagtgttgctatagtttaagatggagggaatagataaaatgatgtttattagttacatatatgcacatcgatataatgggtaaaattaatgtgattacaacacttgtactaaaaatctcgatcaactgtacttgcatttgaccagcttaattaatttgctatgcgtgttcttcagccttttcattctcatgatctggacaaggactgaactgggatcgatcgatgcaaaaatatacaatgttttatcgatgaatcgtttcatcgatctggtgtactttcctgcgaatcgaagcatactgatttgggaatgtggttgatccccaattggtgcatgctcatctcgatcaaaaaaaaaggggggaaaacaaactgaactgaattagcttttaattggacgattcgtccttacattcgtgcttgcattcatgagcctaaagctgaattagcttttgtggagttgaagagttgtagcatgcgcgtcctctcgatcgacaagaacataatatactccatcgctagtaacatgcatatgggtgctagctttattatatactatcagcttttgatttatcggtgcttgcaaaagcctacgtaaaagatagcacacctgcatccctgtataatccatgcatgcactgatatgatatgcaggtcctggtggaaaaatagcttatggggctggagtcgaaggagcttttatagacatagaaatcataatacattggtgcagaaatcatttttctaggcggcgtataatccgtttacacgggtgattcctgacctgcctctagccgatggcctgcacaaatcaagtatttttacgggcgcccaaaaaagaaccgtacgtgaaaatacatttacaaatgcaaatatctttaagtttccgctgcaagaaaaatacatttttcacgggctattttttaaaacaactgctcgtgaaagcatttttcgcatgtgatttggttaggaaatcctcctgccatgtagaacgagatagcaaccttcaggagcagcaagtgcccattgtaagttgcgagcttgtcctgaggccatccggccgagggcacgcctgcctggacgtcacgaaacccgtcaaaaaaaagttaggagcatgtcaaatcattggtgttttactgccctctttcttatttgaaatagaaagaaagggatataattaacgcagtggtggatatagtggcgggatattatggcttgggtagccaaatactccccatcctaaaatgcaaggcaatattactttcaaaaatcaaattttggattaatatttatatactaacaatgagtaaaatatgcatgcgcagaattatgcatacactcattgatactatcaccttgatattaagtgcttgtttagattgatactaatttgtgtgctagcttcaataatatcaaaaagatgtttaccataaaccctaaaccctttggtttgctactaaaatttttgcccaaatgagttcaaattctatactactcctatcgttagaaaaaaataagtatttctagattgtctagcaattactaatgttatgcaaaatatttcttttcagttaattcatttgtcaaattttgaattttgaattgttatgattctctttccaagcatctg

SEQ ID NO: 51596 - DNA, 3999 bp, Oryza sativa
aaaacttaagcccgtcacggatgacccctatcagtgacgggccacaactttaggcccgtttgagatatggaatgttatctcaatcgggcctaaagttgtggcccgtcactgataggggtcatccgtgacgggcttaagttttatacccatctaacatgtatgtgcgaccatatctcaatcggacacttttcagcccgattgagatgacttccttgtgacggcccgctatttctaagcatattagagcccgtcacagatagaagtatctgtactaatgaaacttgtgctctaggggttcatgattggtcacaaataatgtctctaatcaagcaagtcatgatagagagggcactatgttcaaagtagagatgatcataggatcaaagcatgcatataatatatatatatatatatatatatatatatatatatattagcaacagagatgatttttttaaaaaaaaacaattaacatcagaagcagaaaagttcaacggatcttgttgatgaaattggtgtgaagccccttacaatgtcctccgttatagaggtggtgtatcaaaggtggacagacaaattaaacaaaggtttggaacgttgcaacagataaatggccagtgtagcgcattaggccaatttggggaaaaaaaattggacactgctgtgcaggtaacactggcaatggccatggaagcatgacggtcactgaatgtggccatgttgcaaggcgaagcaaagatcaatggaagcaactcagatggttcaaatggatacaagtatatttgtgtcaagacagagcaacattcttaagtttaatgttaagttcggaggtgagcaaattgtagaactgcttcaagcctgtaatgatgtttttttattcccttctaactttggtccacaaaccctaaccttatgattatagtactaaattcatccttaggaccaccaccactaacttccatttctacgcaacaaattaaattcaccaaaacaagaaatacatacagttgacatgctgcagcctgcagctcgctaatgccattccttggactggtggtggccattacatagaccagagcaatatgaaaattctcaaacaaaagaaatggtggccattctgcaatatgaaaggggattatgaatatactgaatcacaatttcaaccaacttatcagtgtataaaacgctgatgatttttacagcactcccatacagatttcaaccaaatttgtgctgaatttgtatattatttcatatagatttgcactgagccacctagtctttcacaggctttgctcagagctgactcgagctgcagctgtagctggctaagctcatccattgtgaccaccaatggcaggtcttctctagttgcctcttcaagcttaacatatgctagtttaacagttcagatacctgaccatcatgaagagttgtttgctcactcacacaaaatcacaccgtttcaattcagtttttgaaattgctctgaaatctgtaaatgaaagaaggctttgttaattgtaacctgtaagcaggagccaggagcaaaaaaacagacatggacataacatcaagattgaaaactaaacatggtaaaaacgtgaaaggcatgtgtaaaccatttctttttcagatgctttgagaaagtactaatatagcaagaccatgactcattgattcagtatctacttgactacttactacctctgtttcagaatgtaagactttctagcattgcccacatatatagatgtctatatgtatgtgggcaatgctacaaagtcttacattgtgaaacggaggaagtaattagtattgactcaccttggctcttcctctgctagctactgctgctcgcctcctgatgccctgatgccccaatggcggaaggcctgatctgctagttgcttggcaatcggcaccactgcaccagcgatcttgtcgcccagtgcccttgcttaggtgctcgctgatgtgccgccaccgtctgcctctgccggctcacactcggcatccgatgcgcggctccacgcccacggcccacctccgcttactactcgttgtcgccgcaggtctattgccgctgttcgttgcagaagcctgcaacatggctgggtcgttgttgccacttgccaagacgcccccaatgcctcaatcccccaaggctccaaccctaatctatggagtgattgagagagaagtggactggatgagagagaagtgatctgagaagcgggtgggagcgcgacggcatgcagcggggcggtggtgatgcagagggcgtgtgtcggaacccggaattaacaacttggatccgactaagataatgtatcaatccctgaatcagtaaatattgatacatacaatataactggttattcattgcatacgttaaagttttacaatactaagggttttacaataataggtactcacctaactaattaattaataattaatacacagcggaagtttctatacattctgactagggaggtataacctttagggattctctaagttatcgggatcatcgtagtaatagtcataagggtcctcctcttgacccagatctgaaaaagaggttataagagcaaggatgagtattcacaatactcagcaaattatcatagaaatatgttatgcattgacatatagtagggttctttgcaaaaagcagtaataaacaatctgagagagttatagcaagaatttataaacatatagactttagatttctaaccagggtaccatatgagtcccggtactcaactccatgagtacggctattcgaatagtttcaaggatattctactgcagcagatgtacgctttacccgcagtccacgacttgctgataatcatcggctttagtcatggcctagtattaagtcattaacaattgtggcacctgttccatgaacttatatcctcatatgctctgaacgtattgttaacagcagcaagaggagttacggcgttcccgaggtatttaaggggaactgatcgtatgacaccacgtcatctcgatcagggtttagaaatataccatatagtttatactcgagtatcacaaacaatttacctgtacatggtaatggttaaagttgcccttcgcggctatagttgcctcctgtgcgaggacttaaaaataagaaccactatacagaggtgccatattgctaattaacataataactaggtctgtccccattctagaaactgcggtcgtacccgttcgttcgacataagtacctggtaataactatatcgatcgagacagtactagccacccggaaatcaaccaaatcttacgtactgtcccaatctaagtataaggtattttaaccagattgtaagcaaagtaagcaatactaaattatctgggtttctatggttgatttatgcatataaaatagaatattgaatagaaggctataaataaataatttgtagaatataggcttaaatgatcaaaggtatatggtaacttgccttgctcgatgtcctgagattgattgatattatctattgagtcagaagaaccctcaagacctagggttatacatataaaattcaaattcaaaaaggaattcaaatgaaatccaaaataagaaaaatagggaaaataaaataaaatagaaaaaataacaaaagggggcacaaaagatagagaatgattttagaagaatattggtccaagtttcactggaattggatctatattttaaaagatatgggcttctaaagtttgaaaatcaattaaatgtgaaatgttactgtgtgcgggtcccacctgtcagtctctctctctctctcttctcttcttctacctccagccgttccccaaaggcggccggcggcgctagggttggtgattgcagtggtgatggagggggaaaggggttgcggccgaggaggggagggagctagagttctccggcgacggtgagcggcggcgtacgggttaatttgttgtgtggatggcctatcggct

SEQ ID NO: 51597 - DNA, 2094 bp, Oryza sativa
ggcgatggtggttgatggaatggattggtgaagcagagcttcggggttgtggggctatggttattgatgatcgatgatgggcaaggaagggattggggtcctatttatagggctagaagaagtggatgagctcgggcaccgtcatcgccatggatgagctcgaactttagatatggctggggtggaaagggctgtgagagggcggccaagatcaatttgagtggcggaagaccacgtttgaatacttactggcgaaggattggcttgatcgcgagtagaaacggctggcgacgtgttggcgccaatccgggcgcgacgtgcggcggcggcgagggtggaaacggccgactcgggggtgaatggtttgaattgtgaggggggaaaccaccgtctaactttaatccaaccatgcggcaagaattggcgtgattcaccccgggtagaagcgcaatcgcactcggcggcggcttggacgggagcgcacggcgtcgagtggcgattccttgcggcggtcttcatcccggctttgttgtcgccgtgattggtgcggctgcggtggtctgagggcgtcaaacggctagcggcgcgccaaggcgatcgggcacgcgcgatcgatctcgagaccgacgcgcggcggcacggcgcgcggctaagtcggatgtccgagcggcgcacgtgaaggggaggaagaagcaaagaaagccacggttttgagtggggtgtggtcccctaagatcaattctagactttgcacaagattgggtggtggttgggctgctctagttgggctgggcatttcatcgagcaccttatgtgcaaagaacagtgaatttcagaaattttgattattttcctagagaagattgaatttaaactatgaattttagaagggtttcactagggtttgaagtaaagcaaatcctcactaaagttagggtaaactaaggaaataatctatagtttgaaatttgagagaatttgctcaaattcactaaggtttggaataaagggaatatttagggtaaattagtagggttctaaggaagtaacacttgaaccaattagaaatcaaataaatatttaaaacacacaagattaattaaaagccagcatgatgcagttaaattttagtttagaatttgagaatgttacagcgtggcgatgaggagatggggacgctgaggagacaggaagcgtagtggatgacggcggcgagcaggaggacggggcgttgtcgtgggggcgacgtcggtgctgcccgcctggatcgggtggtacttttccgcgtagaacaccgtgctcgcggccgtcgccgcctcccccgccactcatctcgccgccggtggcgcttccctcctgcgcgactcgctggccgggactgagcaagaggcgctgctggtggcaccggcggggaggggcgtcggtgccgcccggtggctgtttggagcgagagggaaggggcggagcaggatttgacgacgtgggcggggattttgcgatggggaagaggcggatttggcgacaatttcttttgagaagtgctaattggagggttaatgggccggtgctaattgcaattacaactcgttgctttttatattagtctggactaggggcctgttcactttgctgccatttttaaccttaccaaattttgataaagttgctaaaaaaatagctacattttgtttgctaccaaattttggtaaattactagcaaaggtgcccgtgcgttgcaacgggaagtgtacagaaaaaaaattgagaaaaaattacattatgtaattaattaaaatatttggtatttttaagtaggtaggtgtataattaaatcaatttacaagtaaagcaagtgtgcaaaataaaatgacatggttaaatttaattttattaaattctccattattagttacgctttttggaattttattggaattatcagagcttaaattgctaatttttaataatacaaacatcatttaacaattatttaattggaaaaaataaaatcaaaatcctcctatgtttgggccgaatatagcaaagtttatatcccctcccttttgtctattctatgtgtctggcatgttttct

SEQ ID NO: 51598 - DNA, 1221 bp, Oryza sativa
aaaatttaacatgaggtagaatctcatggaaataatcctttgagtctttattctccacaaattcatgtgtttttcctgcggctcaatcaaacgatcattcctatgttttttatgtgttttgtaattcttcattttacaattgtattcgtgtcaaaatcctatatttttcatattcctctgtttttttattcatgtgattcaaaggagcccatacaattatttttaagtattggaatccttggtgaaaaaattaccatgacaccctttgtaccagagtaatagtattgcaaggttactatgagttgcttccctatacacttcatttcataagaaatttaacatgagctcatatctcttgttttatttttttaaattttttcctcaatctctactctctttccgcataggatttcctctaaaatttatgtatttgaatttttgtgaaccatccaaatatattacatctattgttcctatctattcctacgttgttagcttcccatactcccacattgttcaaaggtggcaagagtacgtacaacattgtgtatctgttttgtaagttattaactaaattgatatgagttattaagtaagacattgtaaaatgccatgttcatgcatagcctgataagaacagtttacaaatgacataatttcgtaagtgaatttgcttcagttatataaatgctcatgtcatagcaaacgctttccttataaaatacacaaacataaagatattagttcacaccatggtaatctaaagtataaaccacgctaaaaaaggacttcaatgaaaaaaacaagcaaggcatatgccattgaaagcgaatattcatgtgcattaccacaccatgcctttcttaacacctaaccttgcttttggaagagcaagacaccgtcaaatttgattcatgaaaacgcacacaagaaaggtaaaggaagtatcaagttgcaattagttactattagcacatggagtctgtactataaaatcaatagaccggaacaaacatcaaagaaaccaatcaaagataactttaataaaaaaccattgattttagatgcaactaatcaaacacttatccatgtggcaaatctatgggcctccctttttcttatagtcttctgggtctccatttttaagtcttttgggtcaaattcttttaggaagaagtcgtttgggttaatttttctgatataggtcatttgggtcaattt

SEQ ID NO: 51599 - DNA, 1609 bp, Oryza sativa
caaatgcatgagaatcaggaacggagttaaacaaaaaggggaagtctaaccctacatgaacaactctgcatcacaaatttcacccggtagcatttctttcttgcaagatccatcgaagaacggacaggttcttgattatggccacaacgacaagaaaactaaaacaaacccttcacagcccagcccccatggcgtctgaatcatcatcagcagatcgcatacgaaaattctctaaccaatcccagccaagaatcacacatctagaatgaactagcgtagaaaaggtgcaccatcatcatcatcatcagttcatcatcaccacacgaagtcacgaagaggagaaaggggtggttacctagaaggaataatcaatggaggatcggtgggtgaggcccttaccaggagagacgacgaagaggcaatgcgaggggcgcggccaagcgcagacggggagagggagggagggaggcggccggtcgtacggcgcgaggcggcgatcggtggcggcgacggcgaggttttcgcttccccctctccgccgagagaggatgagaggagagtgaagagaggctgggccggataggcgcattttgggcctcaattggatgggcccatatgtcggctttgattttttttttcaaacttatttttttggtttggttaagtttatagaaaatttgacaaaatctatatttcttttatttttcataatatttttgttttgtgctgaaaatattattatatttttctataaagtcggtcaaacttttaggaaaaagtgaaaatagtccctaatatgaaatggagggagtacaattataggccaaatttgggcccataaagtggtgggctgagatttcggtccatctaaaggaaggacacggatggacctccatcccagttaaaaggggccgactggacattgaccgtacgtccgtattgcagtcatgtgttagaatttgtttctcttttttttaagcaaaaacgaacaaggtttattatttttgtttcagaaaaagcaaaaaaaaagagaaaatttcataaaactacatgtattttgaataaattatcaaacaaactatatatttaacatgatgtatcacaaaactatagatttaacactaaaattattatagaactatagaatggaatatcacaaaactacgcatttagtaacacagttatcaccatattatagaatttaaatatcataaaactataaatttagttacaaagttaccataaaacttggacacctttaactctaacataacattattgattattgttaatgatttgaactcaaaaatatatagttttgtgataattttattattaaacatgtagttttgtgataaatttagtgttcaatctgtagttttgtgatatatcacattaaatctataattttgtaataatttgaccaaagcatatgtaattttgtggaaattataattaaaaaaagttcacaatcgctgccggctgccgctgtcatttttgcttgggatcacagctgcttcagatacacccacatctcaaatgcaaagcttcatcatcaaattaaagaaagaaaaaccttcgaagcatttcattctacaaacgttgggct

SEQ ID NO: 51600 - DNA, 1631 bp, Oryza sativa
aagctaaaatggactttttttccctataaaactaaagtgggaatgtttggcgttgtagaaccaattatccccaagttaaaaactgaaatttaactattcaaatgaactatgatcaaattttacgaaaatttagaagacacttgaccccttagtggaattttcttgaaatttggttgaagttgataaaaattacatatttttgtttctagtagaggaaaaagggagataaaggtgttttgtctaattcccctatgaaaatttatcaaatttgattgtacaatgaaatttctcataatttatatatatccaaccatattatgatgaatgaatattgcatgattatacccatatagcataatcaataagtttattattgaagtgtggttaaagtttaaatataaatggtggcgtcagatgacaagtttcgtaaaaggaggtagtaattagttgaaaagttcagtttagaaaaataaatactagttttgttgttaaaataagtggttgtcctaggtttgccggattgcttgattgcaacaagcagcaactgtgctattctccagatcccagtgacatggcatttcatttcgccaatgctctatgcttcacatatggctctcaagtaccaccatcatgtcagcatgtcacgaagtcccattgccagtggccgcaccaatggttagcagttgctctgcctctacacaccaaatgcaccatcattagtcgtctcctctcacgactacctcatccgctagtatgcccatgattatgtgctcacgaatcagttagtcgcaaattaaagctagctcacatacttgttgcatcctcacccgtgattgaggatgcgtggcacacacaaaaggagaagatgcaacaaccaattaaggtgatgttggcctgcaatgctgacgggaaactatttttcgttttaatagtctattatagtgttggttcaaatagatctactaatgcccagtacaaagaaaaatatgtaacataggatatagattaagatatgcccatatctccaaacaaatatttaacacactttgttcaacttcacaggcatccaaaataattaaactaataaatattataagtaacaaactatattatatttgggtaaaatggccctaaggtttatagtattaggttgtaacttcatcaaatatctcaacaccttaaaatccaaataaccaatactccctccatcccattttaagtgcgacaagtttccgcgcccaactttgataattcgtcttatttaaaattttttataattagtatttttattattatgagatgataaagtatgaatagtactttatacataacttatgcttttaatttttttttaaatttttttcaaataagatagatggtcaaagttgtgtaaaaaaatcatggctgcacttaaatggaacggatggagtaccttttaaccatttttaattcaatggatagtaatgctgatgtattcacattagtttcactagaaaattattattttttcaacgtaccaggtacattcaacacatgtttttgatctcacatacaaaggctaacatccaacggagcaattttacaagaaacaatctgcttccgcccaatacttttataaaaaaacccctagc

SEQ ID NO: 51601 - DNA, 1786 bp, Oryza sativa
agaacgataggaatgggaggcatcggaaaatagtgagacaaatatatccacctccaattctagaagtgaaaactgatatctcatttttccaccatgttcccactcccactgctcttagattacctctttcttcctcttcctggctcatcccaaacacctaaggctccaaatatttcaggcttagaacatgaactgttgatgatgcctgtggtgttgaagtatatatatagacataggtgaagcacctaaactgtatactgtacaggaggcaatgagtatgcacacatcataatgaaccataacacacaacagtcagtgacagtgggccatagatcatctacttttaatgtagacctcatgcaatggagacaccagtacatcttctgcctactctcatataaaacagctgacacaatagtccttggttttgagccttgcaaggttagtcattaaatctgagccatgcatttacataaggaagaaaggaacctatgccatgaattcattctgattactttgagaatgatagttgggtggaggaagaaataatagtgctcgcagtggaggatcactggaaccaagcataattttctcacaattaaagatgatctgccccaacatataatgctagccatttttttagaccatagatcgaaccagctcttttagaaagccaagataacaaggtctttacaggaaagtaaaaacagaaaattaaaaagaagcaacagatttcaacgttggggatgaaccagtttacactttcagcataccatctacctctaaacaggaaacttagcccctacctacactccagggaacaaagactagaaacaaaatgcagcaaagcaaagaaaactagttcaaatcgccagaggtagaacatctgtgggtctcagttcctgcatcctgtccatcactttttcaatccatttccccgtcttctgtgtcttcttccttcagaaatatcttccatttctgcagcagaacaatcattctaaccgagatttcacaagaatgttttcatgcactgtcatttctcccactcaactgagcccaagaaatagctgccaacatcaccagatacaaattcaaattctttgcattcaacttctcaacattggccaaatgccataaattttcaaactcccagggcacctctgcaaaccccacaagtttctgatcatactccaagcaaagactgcattctaggggacagtcaaacaaaatatacaatgctagccatttggccaacgaatattacaattttcgcataagcagagacgcatcatgtaagtgtaagcttcattggctgatgggtctaaactctgaatacagagcatggaacaaaactaaaaaagatcatacatttggttttactgaaggagaaactgccatgaacttttggttgcaatcccttgaagaccggaaatctgcaacattagttttatgtaatatatccactgagaatctaacattttcaggacaggcttgattcctgtcgacctggaagactgagaaattttgagaaacagtgtggttatttagctcagtttctgcttaaccctgtataaaacagatgataaaagtattttgagtctaaggaaaaagtaatagaagcaactggttccattaccatctggatcatttgaggcgattatattttagagagctgtggataggtattgtcactattcttgtgctgcttttttgctacatttgcatttctcttcttttctgtccactctagtggccacgcatcagtgccaactgggctgcaggaatt

SEQ ID NO: 51602 - DNA, 5820 bp, Oryza sativa
actctagatggatgggaaatgaaaaacaataaacattacaaacatcataaaaatatttgaggggacaccaaaactattgctttattatttttatctaattcgagagagaaaccgtaatgaaatgatgaatttgtccctcgagctagcacatgtatgttactcggctttggtttgatcgaaccgaacaatgccatcttttccgcccgacccccttcaaaaatctagaatggcgaccacgactccacgagtacattttacaactttccaatttgtttactttttcaaatgtttagaaaaaatcaattgtttattcttttcttatttttccaaattttcaaactacacattatgcaatttgcaatctactatcgccccaagtatattgctgccatatatcaaatttcttctttgcatcaggttagaaacttgtggctcaaaagtcattcttgtatttttgaaaaaaaaactctctctccaattgaacctaaataaaataatagctacggtgcctgtactatccaataaattacatatttgaatgtgtcctttcttcatcgtacacttttattgtccaacatcaaattacttaaagtgttatgtagtaaaatttgccaatgaaaagtgtttataaaatttgcccgttgttttagaagaacacttctatatatatatgacatatcatatataattggaattttggtggtaaggtttcacaaaactacccacatctgaatccctcttaatcacaaaagctttctgattcccaatcattcaaataccatttaagaaaatcctatattatagtttattctttttccatagacggttcacgaaacttctctaattggtgaccttctaatagtagcgtgatgtaaacaaatgagtcttgtttcaaccataagtagcatatattttatcagataattcaaaaccatctaggtaaaccccgttaaggcattactatataggaaccatcggtgatgaccttctcagtaataggctaaatctgttaggatacacgtaggctacgatagtataaattaaaattttctatcgcgtaaaccaggaaccatacaagtattagatcatagatcgttaccactcgacgcgctgcgcagcgaaagaaggcgctaagaagtcgaaggaattctcgcgaagtagcgggtcgatgtagaggaagtagtcgatcgcaccagctcgatcttcttctcctcgtgcgttctcctcgccgtattcacatgctgatcagtaccgcaaaccagcggcgcctctaccggtatccacacgtatagggacggaacgccacgcgtaaatgtgctagcactcgcgcgcggctagggttttgcttagggaggatagtgacggctagggtttctcacatgatgcaatacctccgccggtcacacctctcacgaatatataggatccatcacttgggcctccaaggcccgtaggactcctattcggatccttatccgaatcaagctcatattggatctccatccaatccccttattctagcccattaagcgtgcgactctgtaggttcatgtacactcggctgtaacccaaaaactccttttcggttcacgcgtcaacagcggcccctagcagagtgtattgacccacggggcatacataaagatcatatcggctgaacctttagtgtatacttgtatgaacccctttgcctcacgatatcgattaagctcaaggctagatatgtgccatcctctaacagctcaaccgttcactcgaacctgttaatagattatataacttgtgattgactcctcaatcacctttggcatggctatgcacttccataatctacaacatcgaggggcccagagatatatctccataggaggggcaaatcccatcttgattattcatatcccactacatgtttcatagcatacccgaaaactacttttataactactcaactacggagtagcgtttagcagtccctaagtaagctactacacatgttaggaaccatgataatctcaggtctaaggattcaacaccaatactaaatgagatcactgatgacacaacacatatggctcttgcagtgtctcattatgttgggtctatccaataacatgttcactaacatgtgtccacattattaatttggtatctctataccatgatccatgagacatgatcatcaattaatacatgtgctgatcatctaaatatatttgttctacatatgatatttgatcagggatcctttagaaatagcaacacacaacataaagagtctcatgaaagaatcacatattcattaattatctatttcaaggaacaaagtcggataaatatgtaaacatagtatgtgatacaatcatctctatgattgcctctagggtatatcactaacaaaatcttaatttgaaaattaatctatatgtttgtaattgttttttttccaacataactttggattttaaaccgttaaattgtagatgagtaaagtattgtcctaaaattattttctgttacttcaaacacttataaaccgcagaaaaaaaaatgtcagccaatcagattctaaaaatagcattgtggtactgttatattgttaccagtagcatctttgtttggtggagtttctatcagctaagtttttgtcgaatgctctaactttcataaacaattcagattctcaactaaattatgagaatttaaataaaaaactaaaatataagaattcgtgtagttatagaataaaaaattaattagaagatataggtcagatatagttcatgaagaccagcttttccagtttctctatttttcggaatctcgagcccccaaacaaagcttagatatacctcaatgtttctcattagtttgggcctaaaatgcccaaaaacttctgtaccgttctttcctcatctggaaatgctatgcagtttaaaaaacaaggtcgacaactggtaaaagaaaactaaagataatagaatgagataaatgagaaaagaacaaaaagaagggaagagagcgagatgggggctagctagctgtgcaggttgcgtacaggttgtgtgatgtgagatatagattcaattcttctagagaaagtgtctggtcctatgatcttcatgtacacatattcatgtatgatgttggagcttaatgtatagccacatcttttcaaaactgatgttctaagtgcactcctttaattacgctttgcaacataatacttcgttgcggagaaatagcatttgtggatttgtcataaaaggcattggtgtaagctgagtaacagatgaacaaaaataaacataactatatatgttgcacatcttattcatactaaatgacaacaaataaaaagagaaattgcttaataaaatgatgcacggatctcctgcgtgttcccaaataaaagtaaaaaaagaaaaaaatgatgtaacattaataatccatggtacaagcttcgcaggctctcttgtttcaatcatgcagctcgaaccacacattagtgggagttaggaactctccgccaaacatgcaaaacagaacgatccattagggtatgattaattaagtattagcatttttttttgaaaaatagatcgatatgattttttttaaatcaactttcatatagaattttatgtgaaaaaacacacaatctagtagtttaagaagtgtgcgtgcaaaaattgagggagataagttgggaaagctaacaaaacaattcagcctaactcgctagtgcgccgacgagatatttcaatgtttttttttgttggcacccatgactccgcgcaaagactcctctaccgttctttcctcaactgaaaaacattacgcaattcacatatagaataaggttgacaactacaaggaaagaaaagagaaaggttgagaggagagaaaagaacaaaaaggaaaacaaaagaaaagaaaagaaaagaaagagagaggggaggttgctgcaggtggtgcgtgtgatgtgagattagattctgctcctgcaaaattttattttctctgctcttctcctcttctcttctctgtgggttgctgcaacgcagtttcagcacgcgtcggcgtcactgatgtcaccccctcccgtttcttcttcttttttctcctccttttcgttgttgctgtttgttccttccgatcccattctatgccttttgtgctgcgtctgcgttggtttgtcatgaaaccgtgcacttggctgcctctccaacggcaaaacgattgccggccttttgttcttgtgtggcgcacgcgtgtgccaaatgtttattctcttgttcttgatctttgtttctcttaatctgctcagctgatcaatttctcgaatgtaaaataccggcccaggtaacaggattgcttaaaaaatatattagtatatgattcaaagttttggagaacaccatggtttaatagactgtaacataggctaaattcgatgctgttgattggctgattagcacatggttaattaagtattaactattataaacttgaaatatatatatttttatttttgcaaaacagttttttgaaaaaaaatcgtttagtagcttgaaaagcatgatcacgataaacagtggcggacgcaggattaaaataaagatgaggcgaagatgctcgtctcaataagaacaactaaacgcaaaaaataccatatttatgttgtaatcatattaacatatagtataatcaataaattaaggcaaacaaaaaacaaaaatgatattaaaataaagtaataatttttgcgccgtacataattcgtcatacataaaaagataccagtaaacatatcaatttacaaatatgagtccattcataaagcatggttgatagatatcttttaaaaaataaatatataagaagatatcgcataccagaataaaatgattattattttgcttagaagggagagaaagaaaaacagtaggcacttactatagtaagggacgggggtgaacgatgttgaggaattgaccgaggaaaccatcacatacgcaggattaaaattggacacttgggctgcttatttatgggccaattgtgaattggatgtggtggtagacggtccaagaaggatatggagggtcggggcggcacgggccgtagctgggccggccgcctaaccccgcctaatgggtggtaccgcccctgacgataaacgagagaataactctttccaatcgcacagacaaacacagcgttacttacaggatgtaagataagtaagacaacgagcggtgtgtgtgtatatatatatagtgtgtgtctatatatatatatatatatatatatatatatatatatatatatatatatatatatatatatatggggtatgagaaatatatatcacggtactagatatatgtgtaaaaggtggtttaatttctgatatgcatagctttgttttaagctgaaggtaggcttggttagatccagtgatcattcaagtaacaacattccacactcatgattacttatgaaatttggttactcaagtcattggactccaaacttctcatttacgccctattaaattcattcatgccttgtgagacctatgatgagcgattgttgtcactagaaaaaaaaatgattttctacaattttattttagacttcgtcaagagagaatggtgcaacaacatgtcacttggtgagccttgacaacaatctcgcagcaggtagctaggctggatttttcacattttggtccttttgaaaaacttatttcgcaaatagacccctgaaaaaacttatcccagaaatggtcctttttggggcgccagagtggttggc

SEQ ID NO: 51603 - DNA, 1739 bp, Oryza sativa
cccctagccacctcagcatcgccccgccacgtcggcagggggacggcgccaaagaggctggcgctgtcctgttgaacgacggcgccagccactctggcgccctaaaaaggataatttttgggataagtttttctaggggtctagttacgaaataagtttttcaaaagaaccaaaatgtgaaaaatccagggtagctagggtggtacttgtcgttgaccttgacataatttggaattattgggcctttaatagatgtcacaagtacatgtgtgcaaccttgttgtgcatcataacagcagcagagatcgtgacagctcaagttaaccgcatgccccctttcagctttacaattaaatctgagggtccctttgaatcacaggaataagaaaacggaggaataggaaaaatataggattctgacaggaatgtaaatgtaaaatagaggattacaaaacacaggaaaaacataggaatgaccgtttgattggaccacaggaaaaacacaagaatttgaggagagataaagacttaaaggatttcttccacgaggttctacctcttgttaaaattcctccaaaacttatatatgaagaggcattctataggaatttcataggattccatagggttcattcctttgattcaaagggatttgtaggaaaaattcctatagaaatgaaatcttctaaaattcctatgaatttcctttgaatcaaaaggggcctgaaggtttttaccattcctgtagttatgcatgctgcacacctaatccctgttattccagatcagatcagggtgaagttttggtgatcgatccaggaatttttttggatcaatatgattaacaaacagaagatatatgagctatttgattcgaatgattacatttgatcctacatgcccatttttcttttggcttgcgcaatagaatgtaatagtcccatgatgtatcgaccgtctcctttggagtttggaacaaggaattttgcagaaattaaacaagtttttgtaaaattgctgcgttccaaaagaactattgttttgaacagctcaaaccacagcctattcacaggaaaatacagcaagggcttgttcggttttgaacggctcaaaccacacagcctaaggcttgttcggttaatccatataaggaagacattagaggggaattaacttcacatgtggaattaatccctttcaaccttttgaaccttttgggaggaattaagaagggattagaggagattgaaggagatctattccacaccttccccaaattctcctcaatccttaggtgaggaattaacggaacaaggtctaaagcagatgcacatgttactgcagttgaaaaaaaatctaaccctcctacagttccagttgcagtcagcttactgtcacactatgcaaaatggtaaaaggctgttactgtctgaagctgttttcttcctacgatgtcctggtccaaggaatggcatgtgaaaatgaagtgttgagaaaaagatgaaagcatcggccctgaaaagcatacagatgctacagctaaaataaaaatcatatgtgaattgaatcatattagtgtgttgtcaaccacaaatctatgatgaactatgcatgcaatcttcatgaatggtatgtttattgcctttttccctgatgggtaatctaagggtgaaagcatggtgtaacataaagcagtcaaggtacaattttttataacatcagagctgcaatgctctacc

SEQ ID NO: 51604 - DNA, 978 bp, Oryza sativa
gccagcatggctggcgccgccgcctctattcctgtttctctgtgtggagttgcaacggtgtcatttttattttatttttttgatgtttttacacactcaggatcacgatacaaccaaccataaaaaaaatttaaactcgaactaccacttagctaagtctgaaaatatctagtataccacttagtctactttgcaccttcactaaaattagaccataactcctttagtaaaactctttgatcagcatgttaaacataatgcactctaccactatatgaaattacttaatctaattcaaaatataaccacatgaaatgacatatataagttaaacagtacatagagatgcaatttttttatttttatttcatttttttgatatttttttcacacttaggagaacataggaaccaaccgtataaaaaataaactcaaacggacaaaatatgtgacatgtagaattttccaaaactctaccgaaatggacaaaatatgtcatctattaaaataggcgtaactttctcatacggactcggaattaggcaaataatatatgcatggacatctacagaaaaagttacatccgattctccccagctttgctgggttcggcgatattaaaacctccaaattccgcttgcaagaatggggttttcgaggagagaagtttttcggtggagctttggaaaattccatatgccacatatttcgtccgtttgagtttattttttacatggtgggttcctatgagttcctaagtgtgaaaaagtatcaaaaaaataaaataaaaataaaaaagttgcacatctctctcctctgcactagttcggagagaggagaggagaggaaaaattctacatgtcacatgttacgtctatttgagttcaatttttctatggttggttcttgtgtgtccctaagcgtgaaaaaaatatcaaacaaataaaacaaaaataaaaaattttggggggggggggg

SEQ ID NO: 51605 - DNA, 2559 bp, Oryza sativa
ggggcgagcggcgcggagcattgcggcggcggcggcgagaagagacgagaagaagaaataaagaaagaaaagaaaagggaaacgtgtttggtgggccgtatcgaggcccatttcatgggtgaagtcggctgggcccatttcgaatgaagagtgggtagggctggatggatctatgttttttttctcattggagtaagtctattttacctctctcattatcttgccccttaatcgaaccgcatccctcaacgggtccccctattacgcgattgatcgctggcgcctgcggcgagcgatcggggaaggacccacttgtatgcctaacttgcgtgtgtggaggacgggagatcgaaacgagaaaaaaaactggttcgttggttttgccttttttctgtcttacatacaactggtttgttggtattctaaccattgcttcacatatttttcagtaatttgggatgatctaaatcctagtgtaattaggatgtagttgtgggccactgggccctaacatgttacttcctacgtacgtttacttttgacatataaactaactgtgtctaaaccctatacatacaaatttttgtagaaaatttatacacgtaaacttttaatatagaaactttataggtataaactttagatctataaactttctatagatgaattcaaacgaatttaaaaaataaattttaaaaagtcccacatagatattcgcaaaaagaaatgatatgcacgtacacacgtctccttaggaagaagaaaaggaaaaaaaagcgctaacttggctccatgaaaatcggtaatagtaaaaaaaaaggaaaataaaaacagttaaggagcaatttctaacataaaaaggtaaaaaaaaagatgactcgatcacgtgggcgcacggatggcgatcgtccgcccgttagcaatttcgtccctcaaccacacaaccaagtataactccatcctcaacttgaaaatggtttatgctgagttagcagaaaatactttaaacaataatagtgaccccatgtgtcatcccctctctctctttccctcttctctctccttccaccgcctccccagcctccgcttggtgggttgtattttggcccattgctgaggtgcagaagatttgtggcccgttttgcatgaacggccagttcagtttggttgtttggataggcctagatggtccatgtttttttctttttcttttccaaactcattcgtgtgtgttgcggggtaccgaaaacctagtgctctctctgttttaaattaagggacattgtagattgacgtcaaaatgtgccctactaatttatcggtagtttaaatagtaaatgtgatagtttagtttaatgctaaatagttggtaatgcccatgcttttattataagatttgccatcatgttgctaacaaaacattaataacgaaaaaaagtattaacagccgcatcatttgcttgttggcttatcagacgtaatcagaatttaaatttcaaaagttaattttagatttgattttaaagtttcattagtagtttattattttttaacataagcttttataagttactaaaggatacaagtatataaaacttctacttataaattattttagttgctttagtttgtttttctacggattatcaagtagggatcaaacaatgagaagtgctaaaagaactcgcgcaatccttgacttcaccagagctatttacgcatttcatctccttttctctctgactgatctaatattcttccctgttggaagcttccattgtacggtaacgtaccattgaattttcagaccgaatcgaatcgaagcaggttttccaggatacacatcatcatacatgatgaaaccaagaattcgtcgttcaaagttctaaaatcgagaaagagaagcagtatcaatttagtacttttataatttatatttacgcctgcgggcaacggacgctgtctgatgcgagacaacatcaggcaaattacatcgatcgtcgacaagttaactaactccatccaccactgctggatcgatttcatcatacatatatgtgcaaaacggaatcaaatcgcttctcattctagcagagatcagagtctgaactcgggaaattaaacagcagttcaattgtctaatcaacgtttgctcttccttctcttctagcagagaattgcagaaaatgatgatagagattaataataaaaaactttcgcggacaagtcgatgcaactgatgatgatgccagatatggatcttgttcaagtgcagacaaatcgtgatatcgaccaaattttcagagcgaaccgaagcatcgatcgatcgatcgtctcgcccggtgcagttttttttccagctccagccaagaaaatctcttcttccaggatatacacatgatcagacacggaagaacttgccgttgaaagctctgctgtttttgttcttgagaaaacaaagttacgttgtcgtgtaaagaggagcacggtcagtcagtattcgtgcagagatagatcactgtctgaaaaaaaagaacagttcaagattctcttcttccg

SEQ ID NO: 51606 - DNA, 4504 bp, Oryza sativa
agactaaaaatgcttatatttgagaacggagggagtactcatttagatccccaaacaaccccaaagatcccgctaacgagtaaatcatcaaattttctcagaaaccatggcagctctctactagcgttaccgacagacatatgacgctgaacagcaatctttttgttgatagattgatatatatatatcgtcgcaaattctaggatgtagtgactcccaaattaaattaagcaagtgatgatcgatgcgacgtcgacaacagggctggattttttttttctggtttggtttatttgaaatcttatcatctttgcttttacaaagttcacatgtcgtctctaggcattttctttcaatccctttccgagagcattaattagttgaggtagaattatgcagtgcgtataattgccgtgttgggtgggcaccataacatgatgtgcttctgccaccgttcaaggtgcacaatacgttgttactgtattatcagggtttttctgcttgcagctgtattgtaaaatggttctatggccaaagtatatactccctctattttatattataatatattttgatttttctaaaattaaacttctttaaatttaaagatagagaaatgtagtaactttttaaacatgaaataaatatattatcaaaataaaatcaatgttagatttaatcaaactaatttaattttataaatattattatgttttttataaacttggtcaaactaaatttaagaaagtttaacttaaaaaaagtcaaagcgttcgtaccagtatatatcaagctttcgtcatccccctaagatagaacaaattattttgttaaaatttattatacccatatttaaatatataatattgttgactttattcggtctttagtactcctatgtaacatttatctctgtttttattgaaatataacaataacatctaacaaaattatagcatgtaaaagtatataacgaaaaatatacccatatgattcttatgttctcaatatatttttttttaagaattattgatggttaaagttttaaaagtttgattggatagtcaacattgtcatactttaaataaggagttagctagtagtactagattttaatggaaattcccatataaaataaaataaaaaaatgtgttaaaaggaggatggatatttcagttaaaaagtacagggaggacaagccagatgatatgactctaggttacttttgtaccagctaatttgatgcaatggaattgactaataatgtggtgaggacagtgaggaggggcccatgggagtggtacctatgatgttgcagggtggccatgcagtagatgagctagaaaagtgagtggccatgtccttgattagcatggcctaacaatcaagtgagcaatggtaatatcttggttgctttgacatgtcatcatcattgatttattattggcaactatacattgcccacaatagggtgggataagataaacctaggcatctttttatctttattttctctcattcttaacggatatactatttatcggatgtctaagatcattgcccattaatagatctcaatccaacagctacggtttaatttatctttccctttaactagaagtctagagcccaaaatatgtaaggagtgtttaagagagtccaaggtgacaaaagaccatgccacacttcaatgaaatgtgataggaagaaccatggattgtggtgcagtagcagtgatgccgcctcaaccacaagataatatgatgatagtagataaggttggtaataatgatgagagagatcagcggcacagaacaatgcaacaacgacaagtctgatggcgcaaatcgtgacatataagataggacatatggggtaatggagtatcatcacggaagatgaagaaacgtgtgaccgacaacaatgatgtgcaacaacaaaataagcagcacataggacaggggaagacgtggcctggttttgtgacatagaatccatatcaaattgtgtatgttgagacttgagatacgaggaagcaataactctaagagcccctttaaattggacggttggtaaatgaattttttttagattcagtacctttatgattttgttcttatggatccctctaattcataggaaaagggtaggaaactttcctctacttcaactcttcctatggtaccatcaaaggacatctcttcttatttcacgcgtttcaattcatataggattgaacaagcatatgctactttttaattcctatgtttttttttctatccaatgctttaaaggtgccctgaagtccaatgagattagagcaaactctaaatgaaatgaaagtgaatcgaattattgattgtgtagtaaacgcccttaattatgccttcatgccggaataggaacaaggtgcatgactcctcatagccaacatgaaaacggacagtaaaatcctattgcagttgtagtactagtatatattggtccaatttaggtcaactgcttctctctgaaatattgtctccttttccgacatactccatatgtagtcggaatgtttgtatgggcacgcgagtcggctcatgttatttttttccctcttaatttccaaattatggcaagttggtctcgtgttattttcagtccaagctctgttaatttaatcagtagtaccaaaacaagcagccgtgcatatcatctgtgtgctatattatatgccacacatgcagccatttgctttgtgttcccttctagaagcttaatcgatcgtatcaccgccctcttgccaattaattaagcatgggcttctagaagcttaatcatactgtagtaatatcttagtggagcagataattaattaattaacagtcatgcttaatttaatttgtgagttgtgaagccattcgaattttggacaatgaaaaagacacccatgcaggagattaatttaaaaaccaaaggacagaagggaatggaactcgaccaaaattaaaccatcgttcgttcgtactagtagcatgttgtggccattggcaatggaataaaagtttgaattcaaaagatagaatttgtttatgttctattgaggagagtgatttatttaattaatttgttccatcgcgtggcgtcaaaatcacggtgagataatggctggcgtcgcttgattgtgttttttttatcgtgacgcccaagtaattagtagtacttaattttttgttaatggaataaaacatcccggcctttactcatcagagctatagccaattattacaaaagtaacacccaaacactgagtgtagttcaaatgaattaaacacacctaacaaaataaaagatcaaactaagataaggagagtacatttattcaaatctatttgtgaatctccatccatagtttgcaaggagttgcatggccgttgtctcaagtctacgacatgcaatcttcataaactctcgatcatcttcacacatttgcagctgtacccaaaatcttaacgcctgtatatatttcgcatttatttattatttttcttcaaatatgctaatccttcctgctgctcgagcatgcatgtttcatctgcatctttaagaaatcttacaggttcagtttgactttattttcttcttaattttctgtccgtgttctcgatttccatcttatctcgtgtatcgcctgctgctcaaattctggcctcgttggctttcgaaatatacgaaaccattgacttttaatataacatttaattatttattttatttaaaaatttaatatagcataagttaaaattatttgatgataaaacaagtcacaataaaataaataatacttatatatatttttaaaatgagatgaagggacaatcgttggcatcatatattccggaacagaggaaggagtaattaagaagaagatcgcatctctgcgacgaacagataaagtaggttcatttacacgcactacttgcgatgcaaggcaaaccttaatttaggtcagacagcagaagcaaagaccaagaaattaaacgtatgtagtactccctcaatccctaaatattaacaccgttgacttttttaaatatatttgactgtttgtcttattaaaaaaataagtaattattaatttttttttctatcattttattcattgttaaatatacttttatgtatacatatagttttacatgattcacaaaggtttttgaataagatgaatggtcaaacatgtgttaaaaagtcaaccgcgtcaaacatttagggaaggagggagtattatttttgtcatataatcagaaggtcaaccatagtatctgtcacaacctgtttcagcgcgcatacggcacacaccgcgcactcgcgttcacggcagaaaaaaatgaataatacgcgcccgcccacaccttttttaaaatttgctgcaaatcccgaacgacttgttgctttcaaatacagaagattttcggccaacttgacccctcctccatctgcctggagatttaattgattg

SEQ ID NO: 51607 - DNA, 930 bp, Oryza sativa
tgtttttctcttcatgcgtctaaaaatttatgttttttttcctatgtgctaatcaaacgatagtttggagactttcttgtgtttaaaaatcccctaggaatccaataagtatgtcattctattgctacgtttttcctatttctatgtttttctcaattatgcgtttcaaaggggtacttaaaaggtttcaagacacaagaaagttttaaactaacgtttaattgatagaaaaacataggaccacaagggacgtgaagaaaacataacgtgaaacctggtgtttattttcttcctaaattcatctaaaatagcacatcttaactaatgaaaagtgaaactcaaaatgaaacgaggatgagccacatcattcgataaatattagccgttgaattcactataagacaaagaggataagtgaatcttggcagttggattagatggatggtaaacatagtaactcaagaggtttccggagatgaagctactagaaaatgaaagaaagaaagaaagaaggaaaagctaaagaataagcataggaaagtataaggttatgtatataatttagggtttgcatctattgtaaaaactattttacaaataaaccctcatcataaccaaagattcaccggtcaagattgagctatttagagcttatacaaaatgtatattcatttgattaattttatttctaacaattaattttaatatatttgacaacaaaattgctatagttgcatgcacagtcatggtcacccgaacataagtttaatgcttttcatatgaattcaaaattaaatcaaactcattccttaaaaccttacaaatatttgtatataggctataaagagcacgtgccgacaaaaaaaaacttataaaaaattgtaacaaatattaagctttttaattgtattatcataatattagtcatcc

SEQ ID NO: 51608 - DNA, 872 bp, Oryza sativa
tatatgctccttccacttcctttctagcttgcacaatgtgtgtgtgtgggggggggggggggggactggaggtgcctaccctttggacttggattttttcttttttttgctagtgttataaattttggagagaccagacacgtagttgttggtaatcggaacttgcacactgcatataaagaatccatttcatctccgtcataacttcgaatttacttcctacgctctgcattgtgcaacatggtaaagagcaatcgttttctcatgcacaaatgatccatatagcataaggtaattgaagaatatgaaattctgcaaaactgccaacacagattgctaaaaaaaaattctgcgaataaaatagcacaaggcacaaacttttgacatggctcaccaaattggaagccatttgaactgctaatgtttctgtatattattacttactaacgtcactttaaccatgaaaatctgaagtggagtagtaactcaacatcattattttacgccacttcaaccatggtggcctagtgggaacgctgctgtgattcgtgaagttaggaatttattctctttgcagtttgatgtgataaaggttgtgtattgtcgtagagcttgtaatagtgttgcgcatgactagcaaaaggtgctgcctttggttcctctactcctgtagtttggtcaggacagtttcctgagtttgtttgtaacctggtgaacagcgatatagctgttttggtcaagtaatgaagttcttttttcctctaaaaaaaacattgtggcctagtgggaatcttaccacaatgtcaatgtaaattgatactgccacaattaggcaacttctcttttcaaaaacaattaggcaactacaagta

SEQ ID NO: 51609 - DNA, 1704 bp, Oryza sativa
gcgagccgccgcgcgctgctcatcttccacaggccgccgcacaccgtggcctcctcgccggtgaagactcggaggtaatagaggtagagaggggagaggtggacgccgccgccttgccgctcctactcgcccgccgccatcctcgccacgccgtttcccatccaccacgccacgccgctttcccatccgccaccccactgcgcggcgccgcccctccgctggccgctgcctgtctcctcctccccgtgcctccgccgccgcccaactccaaggcctcccccactggcgtcgcggccctcgcacggtcgccgaggagctcggccgggctgccgcggccgccggccgccgtcgcggcgccgcccttctctcccgcctcggcccgccgaccggcctcaggctgtcaggcacagagagcgagaggagtaaccgaggaagagggggagagtgactcagcctgataagtcgggcccacgtggatcccatgctgactcagctgccacgtaggataaaaccggaatcggatccaccgaaggactgaccggttttaattagttaaggggcgccggatatctggttttgcagtttgcggatgattttgtaactcgatgataagttgagggaccttcggtgtactttttccttgtttgaaagggccaccgaaactgggcctcgactaggcccaattgcctcggaatttgaccagcccaataccgaagtgttaccagtacacaccaccctcttcacttcgccgccgccaccgctggcgacggcgaccgcgagcctccgctatccgaccttacctcgccgctgccgctgccgccggctgggagagtgaggggcggacgcgcggaggacggtgcaggcgcttcggttacggtcggccgaggacctgcagcgagttcggttcgatccgtgagttctccagctcgtcctcttccgcgactagaaaaaaaactgtgttatgcattctgatacaacgagtctgtgagttatgtgatgtttgttttgaatcgattgcaattgcctgtccctagctctactagaaatttactgaaaatgttaattggttgtgcacttgtgtgtgatgcattaggttaaatttagtggaatcgtcttagatcgatcaggttggtggccacattaggatggatggaactcaatggcaatcgccaatttggcatgtctgttcagttgattgttgcatattattattattgatgcagtaacggagctctgaagcttgaggatatacactgtgggagctagggtgataggaacacactcaatttagtatctctgttgttagaatagaagtggtaaaatctgtgacatgttacgaatgattttaggaagaatgatggtcttcctcccatgattcatgccgagactagccggaccatgaagctgtcttttgtttagtaaaagtctagaattaagaactgcaaaaggttacacttgaggatttcttttttttcgcggcgctatctgggttggaatattctcaaatgcaaatttttgtgatggagaactggtgaatccttgattccccttgtttctttgataacttttgtgcaagccaaaaggaagagagaggaacacctgagaacagtaggtatgggaggcattgggaaaacacgggaacatattgtgatccctaattttagagggaaatgatggtcgaggctttcctccatgttcccatgc

SEQ ID NO: 51610 - DNA, 812 bp, Oryza sativa
agatttgcgggggcaaatccacccgtttgaacgcaagagagagagggaaaaatggggggaaagggagaggggatcacggggagtatttccccccactttattgcacgcggggacggcgggatgcggcggatttggcggcggcggcgtcgcttggcgcgggcggagcggcgggagtggcgggaggacggggatgatgggtgggccccacccgtcagcgagggtggcgggtgggcccgcccgtcagcggcgcgcgcgcggggagggaggccgaatgggccgcgggggagaggagagagagaggggggagagagatgggccgggccggcccaaggaagggaagggggacttttagggtttttctttttataaaactttttcaactttgtttatttcttaataattattatttgtgctctgaaaattccactaaaatttatttacgcattttaggcttttaggaaatatacaaaaatcctctaagccttgtttgacttttactttgcacattttattttttggaggctttcacacggattttaattattctaggcgtaatttaaaggatatattttagggtcgttttgggcgtgacacaccacaagtggcagcaatgttccgaagagggggaggaagttctcctctgtacccgggacccgccggaaggcgatgagcccagcggtaagcttctctttcgtccttgagtacgtagtcagaacgacttaacctcacatcatattatcttactcaggacttgggtgcgtctccaccgcctcagcgaaagcagaggttggtgacggtcggcgagaagtaag

SEQ ID NO: 51611 - DNA, 1334 bp, Oryza sativa
tagaccgtaattccgctgctgttttcttttcttttgtaagtatgtaacgttattattatgatggatttgtatattaaattgtcagtttgtgtacctcggctgattcctggacgaggattttatgcacaaataagttcggaaattactagtgaatttctgggcgtgacatgtggtcagtgtggctctggtacaagcatccgaagtgggccataagctagtgtattttgtgtccgaagcactacaaggggcgaagaccatgcttgagactagatgacggtggttgtcaaaggggccttcgccgttgtggctgttcaaaccgcggcatgtgaggtcgaagccactgccttggacggtactggtacggttggggccgcggcggggctgaaggctggacagcctgcatcgccctcggtggcggtacgccaccgtcttaggcggtcaaaagctctactccctcttcacccgccatctcctcttcgccttcgcccccctttcgcctaggcacaactctctctttcacggtcttttttggtggcatctgtggttttgctctgggttccccacggacggcgccaggtgttgtcgaatgacaactgcttcacgtcgaaggacgcggtaaacttgatgtgtggttggaatagtaaagcaatgtattaattgataaaaatttttgggattccccattacatggccctagggggctatttataatccttgtataggctcatactctctagggtttggttagtataggggaatttacatggttacccttatgatagggacattataataggtatacagtgtcttttgtattcatggaccttgaggcggcccccttaggccggcccattagctagcgaagggcctctatgggctgctgggcctcctaagcctttagccgaaggcatttgctactttgggcgatggctttgtgcttcgacttacagccttcgcccgtggtggatctttggttgatcaatgagcctagagccgaacccttcggtcttcattccatggcttcacccagtcatgatggtgaaacccccttggtcttcgtcattctgcttcgcccaaggactttgccccttggcttcgccaatggcacacgtctgggatttagccgatgtttgctattttggatggtttcggcaggtcggccgaaggcccttatgacatacctccaacatagaacatatgtacctttggttgattaatacataaggtattcatggttatatctaagctagttgtgtcctcatcatcctcatcgtcctcgatttcgccttgtcatggagcgtattgaacttatctttatctatcacaacatctgg

SEQ ID NO: 51612 - DNA, 1604 bp, Oryza sativa
ctaaaatctttgtagtcgaaaaaccacaacactcatcttcttgcaaaccaacctgtagctcatttagacaactagaggaactagatagagaattacttatacgcatgcggtcctctagacaatacatttcatcatgaaaaggaggtatagtcaaattcgaacaaacatatacttcatgcacattatattctcctttactatcataattgccaataacatgaaaaatcacatcagaagggcatggcaattcaaatctagcaaataatttcttctgtaagcagttgagtggacaaacatcatcaaattgaatatagccccaagtatttaaagaagatagcaatttaagctctttattctcgctagcaatgtgaataacatgtttgaactcaacacatggtggctctactatagaactaacatgttcattcactagttgtggcatggatagaagtgaaacatcacacaactattctttatcacaagaaacatcaagcaaattgttttatgacaaaggtatttcaacaattgtttccactatgcgttgctctaatgtagcataagtagtggacatagttggtgttgatatttcttaacgacattactagaaatcttcattcccagcaatggcgccagaaatagtcatggtatatgtatggttacaaaactaatccgcaagcgcacggatataccattgtagcattttacccggaagtattccaaggtatcgcatttttaataccaagagaagataataagagtgaacctcgctaatgcactttatacatatactacttataattgtcaaagcctaaacaatggttaaatgtaatatagcggtagagtgacacgaagcaaagctattcaatcctcataataggtaagtctaactaagtggaagaagaaatataaagcactcaattcctatgcttctaatatacactcaaatcctagtttacatccactaatatacaatcatgtggttatgtcacgccctaaaaatcttaaatatataaattgttgtttaattggaattttttagaaattatttttaaaagcctacaagctaaaccctaattttctaggaaaattttcaacataaaaatgagctagataaaattttattaaatactatgcttgctcctctattttctagaattttctgggaattatttgagcaagggaggtatttttttaataattgaaacaacatttcacaaattgttttatttgaaaaagttcaaaaaaccccttctttggtccttgggccgttttcggcccaactctctctttcctctctctccccgcgcgcggcccacgccggcccaagccgccgctgcccgctccccctctcgtggaggccgacaggtggggcccacctgtcaggtccatcccctacctccggccgccgccgcgcaagccgccgagccgccgttttgcgccgccgtttccgcccaaatccgacccggattcttccgattgattgaggggttttgttcctctcggtctcctctttctttcccctcaagaaacaaagaaatccgttgagtattttaaccgaatcgaattcgttttgtttttaaccctaaaaccgagttttaaatctt

SEQ ID NO: 51613 - DNA, 1118 bp, Oryza sativa
gggcaagatcgggcagccaaatttggtatcaacttgaagcttagacatcagagaaaatggtggtattaaaatttaagcggtacaccgcggagatctaaacatttcttctggatttataaaaaacatggataattagtccattttcagtgaattaccctttaatatatcatgaagattgtatttctattcattttaacccattcattcaacgaaatgaactatcaggaatatgtgagagcaatttcatatcaataacttaaaaacttcatgttgaattgaaagatttataaaataagtcactttcatatggctccggttagtctcatttcacaacgccccctatcgtcagagcatgatctgagtcggcagcctaacatgttagcctatggacgtttttttttaaaatcgttaaaaattcattttttgtttaaacgaaaagcacatccaccccgacgtacgttatcactagctctttcattggagccctcatgtctcattgacttttgaaagttcacccaccgtaatttttcaaaataggttgcaagctcgtcattgcctataatacacgtgtgaaacaagtctaactttggactcagtttaccaagcgatttgaaggttataggtcgagcacacgaaacataaaaagcgtgaattatcatagatcacttctgcctatttcattatgtccatttcatccaaccccccaccgtaatttttccatttagtaaaagcaaacattttgccgagtttagcaaaaacatgaatattcatgaacgatcagacaatacagcctttatagtacgtaacgtatagtgaatggaatgggcgatgatccgttcaggaggcagaggtcagtggtttgtgctggcaatgttcacgcgagcgaaaatgagacaatcggagcaatatgtgcactaaaactgtgaatatgtaggattttcctgtttgaagtagtaaatttatacccttattgtgcataccggaattaaatatttcactgaggtattcctcaatgtattacctttcaactgggcaagaaacaaattgaaaaataaaaatcacccaaacttagttttggcgcactttggttcctccctggcccaccggcgcatagtggg

SEQ ID NO: 51614 - DNA, 1046 bp, Oryza sativa
aattcctgcagcccaacctctatgacatcattaagttttgtttttcggaaaaatcttaaccctgcaacattcgataggcagacaatttggtagcgctcacttgctcctcaggactggccacattttaagaactttttgattcattgattttagtcagagtgttcatatgatcctgcaaaggtggataaggatactgatagtcgtgtgtacgaccttcagccaaaatgtacccactttaggaatcacaaaacatggtgagacaaagcaaaaaaacacaacatctttccatttcaggcgaaaaactttgagcatcgcttgcaagaggtaaatatagtaatattcaaattgggggttgacgtgacagtatccataataaagcatttataatgaattaaatgtagaaatattcccctttccacagaatggattttatgccactgaataagaaagtatttttacacatccttgaagcaggaaaaattggcctatcaaacactaaaccaaagcatacctaattatatagggtcacataaaaattacttaattacttcatacatttcaaataattaaccatctgttcaaagaaaatacagataaatctggtgatactgctttactagtttttcttaaactgggagatatggatataaaaattcattagcaaaagaaattatttttgaggaagatttccagaaattagaatatgtgaaacagtcgaattaaattcttcaataggatacatgtacagtgtatatgttgtagaatgtagatcatcaaataaacttgaaatggtaaatggcaatacataattttatgtggttatgactggcgacttttgatgtcacagctgattcccaaactattaaccaaaataataattcagagattttgtaagaaaagatggaataattacatacacagtaaatacctcctgcctttgtgtaagatgaaatagtgaataattatacatgtaaatgtatatatatccatcgctttgtggtacaggtataataagtaagtttgacaccacaattatattttgattt

SEQ ID NO: 51615 - DNA, 1331 bp, Oryza sativa
ccccccccttgagaaaaaaataatgtaaaatcacgtgatttttacgatttttttacgcgtttttcaaattttcgggagcaaaaaaaaaaaaaagttgggccccctcccctaagaaatcctggatccgcgcctgcctacagtattataggtccatgctgaaactctacacacactgctccgattagaccatgggccatggggggcaccatggtttgggggcacatacatgtaattgatcgacgccctggggaggggtctacaaaggttcaacctttctctgagtacgagcctaggccctgccctggccatatatcataactaaggcatagatctagaggtttataccgatcgcaattgtatgttattgttttgtttttaaggcggacagaattgagaggttatcaagctagagacagattaaattggtctgagctaagtcaattttagagtcttaatcttaaattgttttttgtaaattcatcaaggttcactggagaatggagttactcaagatcattgcatagggggtgtaattgtttggcattgactagcatgaccaactggaaataggaattgaaatttattaaatctagacatgcactcagccatcctcaacaatggcatggtgaaaaaaacacccataatcttacctgggaatgtcaccattttccacttaacaagtttaaacttcactgcttgtcaagcatagcaagctatttcctccttatcaaaagaaatgcacatcaagtatccctggcaattgcagcattatcttcaaactgtcagaaaagcttaattgttatgatatctatcttttatcattatttcattttttcaaacataggagacaacgtgccattccgggttaccatgctgaatgctatcgcaatttctgcaaaattatcaggccacagtacacacattatgtctagagcagacccctgacattccaagtccacatggtcatggttggaaagtggaagatggagaaatagatattatttggggacaacaacccccctgccatgggtgtcgatccgtaactgatacctattcatcaggggggatgatctattcattcatccccccccctgatgaataggtattacgtaagtatcgacacccttgccccctgcccctagcagtttgctagaactaacccactgcacttgcaagaagacaaactgcaaggtcccaagtgggaaaaacaagggaagatgctcttgccggcagcataatgtgccatgcaccgatctgtgcaagtgtactgattgtgaaaatccagttgatggaagatgcttacatgaagacacagacactgaagatcaaga

SEQ ID NO: 51616 - DNA, 1099 bp, Oryza sativa
tcacttttgaaggtgggaaagaatgatgcatttattcattgcccgatcacttggcattctaatcatttgtattgtcttcaaggaacaatgcatgagatcttaattatcctgaatttaaaaacgaaatatcatcaaggctatccaacataaaataactaactggatagggtgtaatgtatatatatatcttttaccgcaagggagttgtattttctctcgtgatcatatttggcctcggagcggcacacttcggaaaaatataacccacttcagcagtcaaaaaaattgttgtattacacatcctaccagtcaatatctatataatatcaacaagaagatattaattgcgttgttcattatacagtgcgtctcagaaaaaacgaaaccgagaattatcgatgtttttatcataacttagtcacatttataatcaataaatgacacatatttggaaagcttggatcctcttttttcagttaatgcaacccatatgatgcatatatttcacgcatgagtgataacaatcaatttgaagagaggaaaccaaaaagtcaattggcggacggtatctgaatttcaaagagaaaatcacatttctagaaagctgagtttctgcccttttatatgacatctcaatcacgaaaaatgagcaagggatgacaaagttctatttgtttgaagtagtgcttgcatttccataattttatcaaacgaattcgttttcacggactccctgccgtagcaacaagcaaaattgacaacgtttcgttgacaatcagtcatgcacgaattctctcgtctaagctttccaaatatgtgtcatttatcaattataattgtgattaagttatgttaaaacatcgataattcacgatttcgttttttctaggacacactgtatatgtagttttctgcacaatacatctttagattatatagatccaagtcacgtgaaaggtattgatgactgattaacttactgaatttaatataaaaaaaggggtagggctataggctcttgaaaaagagagggaaaatgtctgcccccccccccccccgattataaaagtgaaggacaacttagtgaaacatttgacaa

SEQ ID NO: 51617 - DNA, 725 bp, Oryza sativa
cggtatgtaaacgatatatggactgctttaacattcgagacatgcatggaagagtctatactggctgtcggtgacgttgcatcatgccatgactcctcggcacggatctgggtcatttgcaggatgcaacgtccacttgagcctatataaacatccatgcctatcatagcagtcaatatatctatactaatgagcggtcattagtaaaattacgtgttaggcaaaataaacgcacggtcacctgtacgctctcaaccaatcatttgattaggatctgcttcatcatctcataatttccattattgtatcgatttttaggtaggcgatccacagtagtgcgtggagaggttaatgcatgaacaccctgtgtgagtgaatgcatgaatagcattgcgcattgacgagtatacaggtaactgtgcacagctctctgttagcgttaaagtaaacctattaaacttggagtttatttgtcagcgataaaaaaaaatcaaaaacaatcttgaaatgaattctctttacatcaaataatacggatctagggctttgtttgtaaaaaaaaaaaaaatgatgcacgtttttatttgttcataacagtatatatatgcactcttgttgaggctgttaatgcacctatcgaaagaagtcgtcaggcttcgtccgatagatgtatacagcctcaaaccgagtgcagatagatcatagaatgaactcattcgcatgca

SEQ ID NO: 51618 - DNA, 565 bp, Oryza sativa
tgtacatgacgtcttgtaatccttttgagataatccaacatattcaatggataattttgacttatgaaactgacttcatagttacaacctctgttaatctcattaacttttacatcctagaaatatcttgatctccacatttgttcaaccactccaaaaatatccaatcgttcaagttgaaaatgttatactctaaattttcttttctctctacttaagcgagatccatggggggaaattacttttcagagtggaacattcatgctttgaaaaactcataccaagagcatagtgatttaaatatatcactaaaaatgtacataacagcacagttaataagtgaggatatgagcttaaattgtacagtaatcatggtatctaatggcgataccatccaggcaacagatatgacagatgagtctgtagaagaagaaatatcagaaaatatgagacaaagtttgtaatattgttaactcatgtacaccttttgtttttaactatttcacctgcgacattcttctcatctcagtatgatttcttttatagatgtttggagtatccagat

SEQ ID NO: 51619 - DNA, 989 bp, Oryza sativa
tgctactatctacatgttgtacatcaggccagtgctagaatttgcagcacctgtttggacatcagggatcacaaacaaccactctgtaagcatcgagcgagttcagaggagagctcttaggattattacctaccctgactctagaacttatgatgaactgcaatctcatcttggtgtctcctctcttaaagagagacgcacatccctttctctaagatttgcagaatcacttctccaatctaaggttcatcgacatctcctgcctgagagcagagttaatgactgtagccgcattctgcgaaatgcacttgatttgtccttgcctaagatgagaactacgaggtaccgaacttcccccatcccatctttcactcgatctttgaataataataaatagaggcttaggtaattatcagtataatgtatgtcatgtatttcagcaataatataattatgtgcaatattaattgtcatgatgattggcacagcaggttcttccattcattcatattttgatgttgcatgtacttttatccttcctctcactctctcatcccttttctctatctgaacttgccacttttcaaatttccttttcttcttcagttctgatctttcctctctatttctatttcactcccaccccctctctctcagctctgtctctctgtctgtctgtctctctctctctctttgctctctctgtctcttcctccttatccctttgtctctccttcctcccctctgtttctctctcccactttctgtccctccctcctcctctccacctcttttctcttatgatgttttacagtacaacattctataattatatttctataattatatgttatttttactgtgaccaataacacctaaggaattccattttttttgttgaaaataatgataaattgaggcttaggtaattatcagtatgttttatatgtcatgtatttcaccaatataattatgtgcaatattaactg

SEQ ID NO: 51620 - DNA, 3680 bp, Oryza sativa
tcccgcttgaagacattttcaagccccaccttttttagggaagttctaaactagtattatctttcaaatgccgttggaatttaaccttttcatttgttgggcctgcaaatgggacatagtacctttaatctccaataagtaaactacccattaggtatattgctcttttagtctaattcccagtttgtgcagttgtgcccgtattgtgtctactatctaaatgatctagtaatcataaataatgataataagtaatgattatcagacctttttggggatggtaaacgaaatgtgcattagaaattagatcatgtggatagtatagacgggctaggtgtagaccatatggaaattagacgaactagttgtagaccaaatagcaattaaccgtgtttctttaaagatataaactttcaagctgaacaacataatcttgatgttccctcttttaaagcggctcaccaaggatggattctgaaataagtcactttaggcttgagcctaaactttcttttttcttgaatagaatttacctaaattattacaaaaacacagccagattttcgtcagaaaagtagaatgttatatggttaacatacatgtacattgaatttgttttgctggaatacgcactacacacataagaatgatataactttacacaaagaaatgatatgcaaataatcaaccccccccccccccccaaaaaaaaaaaaaaaaataaataaaattaaaaaaaataaaacaaaaaaaaaaaaaaaaacatgtaggagtaaacaatgtctaaatttaagaaagtacagtataactcaccatactccttgactacaaatgtcgcacttgactcgacaaggaactaaaaaataggattaaatatgaaaattataatgagaggtaatagtgatttcaaactaggaccagactgaccagttgctggaatgggcctgctgcgaggtacgtgcacatgtactgtttatgttgatcatgaggctagaatagtgtaaagatggatctaggctagaatccactatactgccctctgcggtaaaaagcagtaaaacaatggattcgagcatactaattagatacgtgcagcaggctcctttcgataaaaatgtacccggcaactcctcgaatatcacaatttctgtggcatttcttagacgaaaaaggtcacttttaggggcatactgatggaatgcgctatttctaggcaagtgacggatccttctagctgatatcgggacaccggttccggatcggtgcacggccgtcgggacccggtttataaaattcccgacatgcatatggaaacgttgtatcatccgctcaatctgacttgcgtgcatagaacaaataagcatttttccatgaaaaagtgaagttttctcaaatgtgcgtttctttccagcattggggtgcccggaagtcactttggtaacatttcaaaaagtataatataaaaagacaattaatatgcaattttctgtacttttgtcggaaaaaacatattgtctagcacaatgtcgtctcttgttgcgttggagaagagcaaatagcgagtttcaatcacactttggccactttcgcaaggtctcactcgttccattgcggtcaagcggctttggggtaagtggctaatgaatatactaatcgttagctttcttctgcatggtattaaatttgttttgattttcagttggcaactttgaacagaagataagtctttttgcagatgacacaacttgttttttgaatggggaaacagtttcctttaaacatttatttgaaacgttgactcagtttgcaaaattttcaatttgtcacattaatttaagtaagtcagatgcaattcatataggaaagctgaaaggcagtacagttattccacaagatgcattagggttgaattggaaatcaaaaacgtttaaggctttaggagtggttttctcattgaacacaaaaatgctttacgaactgaattttgttcccagacttgtcattatagaacagattttaaattgttggaggcatagaagcctatccttgttgggcaaaattgctgttgtaaagtcgcttttactcccccaaatgttatttttgttttcagtattatgtattgacctgccaaactctttctttaaaagattaaatggtttgctttttaaattcatttggagcaatggcaatgacagagttaagagagatatattatgcaatgattatgaagaagggggtctaaggatgattaatcctttagtttttgcacaagcgcagaaagttttgtggatggctaaactattagacgataaatatgaaagttgttggaaaacaatagaaatatatattctttctatcttttgtgatgaccatcttgccctttttaaggcagatgcccctgattcggttttggcaaaacttaaaaattgccagttaacagcgtctattaagacatggtatttatataggcaagagatgaaaagagaactaggtttatgtcagtttcatttacaagattttatttggtggaatagaaatgtaagattgcaatatagaacacattttttctatccagtttggtatgaaaggggtattcattccatttttcaattacataatggttttggtaaccccaaaacatttgaagacctcgtaattgagtttgacattcctattagagaccaaaaaaaatatgactccctcatgaatggcatatttttggagtggtttgataattctcttaatgtggatgagaatatatttaatcaaatttttaaagatctattaagtcaaaagaaaatgtctaagtatacatataatattttgctgaagaaatatagttgtactaatgccaaaagggagagtaaatgggaggaactatttggccatcaacccaaagagaaggattggtcgattattcatacgagtaacttttgttgcacgattgagactcagttaaggagtttttatttcaaaattttccataatgctattggttttaatgcatttttgttcaagattgggagaaaggagtctgctaattgttatttttgttcagattttccagaactttagatcacttgttttgtgactgtaggagagttttaccactgtgggaaaaattggtggataagattaacactggcactgatcacagttataatctgactttgtcaaaatttaattttttgtttgggatacagtcaagggacaaatacgcctcttgtataaattttctctgtttatgtttaaaatattatatttactcatgtaggtttcagggaaaagaacttattttcgaagcatttgtttcaatggtaaagttcaaacaaaaaatagaatataaaattgcccaaaagaaaaataagttacaagtccattttaagaaatggtctatcaagtttaactgaaatttaggagtagtcttgcaaagctctgttgtcattaacatcttcattgactttttgaaatgtaaacttgccctctgggaaagtatgtgagtgtgtgtgtgtgtgtgtgtgtatgtgtgcatgtttatgggtgcatgagtgcgtgcctgttttgtagttttaagatattatattttatattgctcttttactctgttaatttttcaaaaataacaataaaaacagaagaaaaaaaaagaaaaaaaaatgttttgattggttgtatatttt

SEQ ID NO: 51621 - DNA, 3637 bp, Oryza sativa
tttgtgaattcgggctgaaagtttcagtaaaagtaacattcatgtgacaaaagaattcgggcctgaaagtttcagtaaaagtaacattcatgtgacaagttaacatcaaatgaaaagcaaagcacaaatgtcacacatgtattcctattcacgaaattgaatgcgaatacataccaccgtctgtccggtgcatatttgaaagctcgttttgcacggctccgtgacaagagtataacatcgcacgctacttaatcgaattaaacgacgcaataagctttttgaatgttgatttacatataagtcattcaatttggcacgaaattgaatggacgtaatgttaattcaggtgctaagtttacggagttgggcggaaaacctatataattatcatcatcacgattattgtattattgtatgatgacgatattaccattatcattatcattattattattatcatcatcatcatcatcatcatcatcatcatcatcataaattctattattataaaagcgaaacatgaatgtacatttaatgacaaacatgaaaggaatacatataataataaacttcacaaataacatcgggcaatcagttaggcctaccgaaattggttccccgcccaattccatatttttgtcactcaaatgaaataaagtggattcaaattcatataattgtaagtatatttcaaacttgcggtaacaaatataacagattacctctcgatccgatggaagcatttcctgatccaaggacatgaccttgattatcactggaatgaacaatgaaataaaaagagttgaattattatccatacagaacaagaccacaacgactatcgacaaatcatgaagaaaacttttaataatactattcacgttcacacatcaatatatagttgggaggcacaaggttattgaaatagccgtatattgatttttttattaattctttcgaagttttgcgatcgttttacagattctgtgtgtgtgcatttgtgcgtgtgtgtgcgtgtgtgtgtgtgtgtgtgtgtgtgttgtgtgcgtttgcatgtgttttttgtttcggccgggggatagtggtgtgtttggtcgaatggtttttgttttgttttatgttaccactgatttcattttttgttcatcattcgtagaatctatgaattgaaaacgaattgaattatgtcaagatgaaaacaaattgtgggtaggtagacttgcatttcaatttggttcgaagggatgactttcagtgtggttagaatggataatgggtctggtatcgtatgacattattcaactaaactgaactaacctttgtaacaagtcgaatggcatgagagtataaaaacaagttaattggtacagaaattaaagaccatcaatactactgggccagaagggattataccaaacagcgaggtcactgacaggtggctatcttattaactcaactaacataagaaaaagaggatcatgggggactaacaggcaccgattggggaagttctctatatagagggagcaagtagctacaagtaggacagtgggactttaaaagaaatcggcgaaatatatggtattcatgttatgtatagtactatgaacaagggaaaagtttcgaaaataatatcgctagtgatattcgtttgtctcgcaatgtggtcaataaggaatctaaaagatcacgacgtttcgtatgctactgcgatacttcgtcaggtgataaaaactactgtaagcaagggtcttttatactcgacgggaggaccgtgcggagcggtccataattcgatcgataattggaacaataacgcacaatgcctattggtcgacgcacacggtgatcgaccaatcaccaggccgctggattcggccgctggttcggctaatacaccaggcctattggccgacgcatacggtactcagccaatcaacgggccgctggatcggaccgtctgctgaatggaatcgaccagtgttggctggcaggacggcgagtgtcatggcggcgtatcgtccgcatccaaaattcggggatatcgatcccgttgtctctgttgaaattattaggattgagacggatattgatagcttctttcaccctccgtgtataccaatgcctttcctgggaaaggcactgaaccccgtcccagtctggttgatgctggttatcccaagcatgttcggctacggctgagttgtcagttcgacggagtctgacgtcccttttatgctcagtgattctttcttttatcggacgggcagcttcaccgatgtaggatctatcacatcctttacaagggatgttgtacacaatgccgtcccgtctatgtggaggaattggatccttggggcatgtaagttgttgacgtagggtggtatctgatctgaaaaccgttcgaatgccatggctctctaggcggcgcttgagttgttgggagaccccatcaatgtacggcaagactgtaaaagtcttgtataccttctgatccctgggttccgacgatctattcttggtattgtgtataaaacggcgtgggtaaccgttgagactcagggcgctgcgaacacgggtccgttctttgcatggctgttgtggacttgtcacaatgcgtgaagctctgtcaaatagacatttcactagacctctcttcaccgatatgggatggtgagagtcaaacgatatgtactagctggtctgtgtgggtaggcttcctatagactgaggtggagagcctatggttgtcgtgtctatgaactagagtgtctaagaatgctatcttcccttcacactctatctctgatgtgaactggatggttggttcaaggctattcatgtgtttaagcagcttatctgtttcagagatgggaactatgatgaaggtgtcatctacgtatctcttccaaacacgaggtatgcaagagaggggacatgtgtccagcgcttcttcttcgaaactctccatgtataggttggccactacagccgagactggactgcccatggctgccccttctgtctgttcatagtatgaacctttatacagaaaatatgtggatcgtagaacaaactcgaggagttgagtgagttgttccggtgagagtgcggtacgggtagacaaattgctgtctgattgtaagcgttgcaatgtagcattgcatgcgccctcaatcggtacattggtgaagagtgaaactacgtcaaacgaaaccatgcgttcttatacacaataccaagaatagatcgtcggaacccagggatcagaaggtatacaagacttttacagtcttgccgtacattggtggggtctcccaacaactcaagcgccgcctagagagccatggcattcgaacggttttcagatcagataccaccctacgtcaacaacttacacgccccaaggatccaattcctccacatagacgggacggcattgtgtacaacatcccttgtaaaggatgtgatagatcctacatcggtgaaactgcccgtccgataaaagaaagaatcactgagcataaaagggacgtcagactccgtcgaactgacaactcagccgtagccgaacatgcttgggataaccagcatcaaccagactgggacggggttcagtgcctttcccaggaaaggc

SEQ ID NO: 51622 - DNA, 3204 bp, Oryza sativa
agattagtgccccatatggaaacgtttggttggatttgtctcataaaagaagttgaccacaaaccaatatcccacacagtgttgagtgcaggggtcaagggccattggcttcatcgggcaggtagttccattatatgaatgagtaaattccgacaacaatattgaaccaatcaaaacaagtttaataccagaagaaagctaacgattagtatattcataagccgctcgcgtcttattttttcgtaccacggcgagcccagattccagtatgaactcatttccatacagaacaagctaggaaagcttgcaaagaggtcacaaacaattggactttgaataattgtgtattgctttgccttacttatttataaaggcaaaaaaaaaaaaatgagatttgaaccctcacgtcaactcctaatttctattagtatcacgctgtctttaccaattgagctagcgatgagttgattaaagattgatttgtataataactatcaccctattaaccaccctaccggattccacgtgcgcatgcgctggtttcctttgcgaacgcgcatgcgcaggtccccctcgcgagctcaatctgggctcgccgtggtacgaaaaaataagacgctagccgctcaccccaaagctgcctgaccataatggaacgagtgagggcttgcgagaccgaccgaagtgcaattgaaactctcatctctgataattgcccccttttattctgacacgtgccccttcctttttctttctaaaaaatgccgcttttcctactgataaatgcccccccccccttttttataaataagagccccatccccttctcataaattcccctactcataactctgattagtacctctattaaaatgtaacaggtgccccttttcctactacaagtgccaattttccctcataataagtgcctctgtacatctcaagtgagtgccccttttcatttccggtgagggctctcattcgaatttgagagatgcccccttgaattttgtttataagtgcccccttttatctgtaataattgcgtttgttattttgacacgtgcccccttttcctacctgattagtaccatttttcttctgataattgcctttaattctcctttataataagtgccccttttccattctcatgaatgccttattcatctctagtgagcgccccttatcaggtgcgagaactgccccattttcacctctgataattcccctttttaatttgacacgcgccccttttattttctaataagtgtcattttccgtgtagatatgtgtcttttttcatttcaccataaaatgtactcataatttatagcaactaatagcaaatgctaaatatattactcattgcggatatagtatcgaaaataatatcgctagtgatattcgtttgtctcgcaatgtggtcaataaggaatctaaaaggtcacgacgtttcgtatgctactgcgatacttcgtcaggtgataaaaactgttgtaagcaagggtcttttatactttacgggaggaccgtaaagcggtctaaaattcgatcgataattggaacaataacgcccaatgcctattggtcgacgcacacggtgatctaccaatcaccaaggccgctggttcggccgctggttcggctgatgcaccaggcctattggcctattggcctattggcctattggcccatattaatttcgcccatagctcgctcactacgctcgctcacatttaaagtttatataattatgttttttattaaatatctgttcagtctttcatgattagattgtgcttacaacaacatcataacttttttctttctctttattagatgtagtttttcgccctgcgacctcataaatctaaaagatttttgctcgctcgattcgcgagctcgcaaataaatatattcagaccatcacacccaactgcaaaatcatgatgcttaagcattatcttgacctatgtaaagagagtaacaaacattataatcatccgtcataatataatcacaatgtagggatgtataccaatgtctaaacgtggcatattttccctttgaggtttcccttaaagtaggtgcccctttttcttggtgcccctttactttgtaagacgctccacgacctctggataatgggtgggatattgacttatcatctcattgctcaaagtgtaaagagtattaatgttaagtgactctcacactctgccgtgtaggcctaccgtgtgccaccgtgcgcgaaaatgtctgcggacggtggagaacggcgagggcacacggtggttcgttatcaaagcgggcaacacgttaatagggcgttggcgcttatttacacccggtgggacccggcgaaagttttgggcatgttcaaaactttggccgggtggcaccggctgcaagtaagcggcaagaggacgatgttgaacggtatgaggacggtatgaatacgttatgaaaacggtcacactgtatgaacacgttcacaacacgctcataacccgttacagaacggtgatgaacgggcaaaaaaatcggggtatttatggcagtcgtgtcatgacgtcagcagtccggggactcgctcacaggacgctccgagcggtgaggggacgctaagtgactggtaggtggctgctacaaacccggtgcacacgttcgagacccggtatgggcccggtatggaaacggccaaaattttcaacaaaagtcaatctgggcggtgaagacggtagaagcacgttcaacacccggtatgcgcccggtgagaacggtcagaagatggcaacgaaacggtgaaaagattaattttatgaattgttttttttgcggccggggacaagttcgctcaaaacccgacgttctggactctgttgttttttaatagcccggcaggtggacggtaggcctacacggcagagtgtgagagctccattagcaatcaagtaattttgtatagtggatagatgcaaagaactttagcctcatgaataatcaacgtaacagacaacagtacgccttagctagaacgtagtttgtatttaatagcctacatcttgaccgttatcgtcaatatccgcattttccctagaaaacaattgcccattatatgccagctggggcgatgcggattcttttctgccccagttttttgttttgctcattacgccactggatacacatcccaaccca

SEQ ID NO: 51623 - DNA, 3206 bp, Oryza sativa
gtgcagttgtgatccccatcaggtaattaccttatttatacccttcgctcctctaattacaagaagaaaaaaaatcaccccacatggccctgcccatccgcccctcctgtcattggtaagataatactcactagagaatatgaacaatttaacccctttctatttcacgtgagaatgtacgtacttgttccttgaaacaatttgtttatattaattccttgttgagctagaatcaggaagtgtttggagccaggataatggcatgttttcctcttatcttatgatctaggaggtcataacctgttctgttccgatgctctgtttaatttgtgttaaagctatgacattcagcttttggagatggaaattaaacattaccatagttcaccgaaaaacattgggtgcaagataagttgaatccctctatgccacatataattttacttggcgtttcaatgaattaaaaaagaaaaaaaaagaaaagaaagaaagaaaaaatacattataggcctacgtaagaaagaaaaaaaacaaaaacaagggaagaaactgaaagtaagcaaaaacatagaaagaaagaaaatttaagtaagttagaaagaaagaaagaaagaatcgaaaggaagaaagaaagagagaaaattcaagtaaatactaatgcaagagggaaataaaactagagctttgctttttcaagtacccgaaaagtgcgcattttacgtaaggaaaatgttcctttttcttcctaataagcgctccttaatccccattgtcataagtgtcccttgttacctttgataagtgtccctatccagatctgatagttgcctattgtatttggaaaagtgtctcttttcctttgtagtaagtgcattttccccttttgataggtgcccctttttatttctgattaaagcccatttttgtatatatttatatcataaatgcccactttcctttcaaatacgtggcttttgcccttctgaatagtgcccctttgtttctttcaaaaaaaaattctcctttaatatcctcaaaatacccctttttgcccccggtaaaagccccctcttaaatatgacaaattcccccttgttactttgatgaatatccattttccttatcaataattgccctcccaggtcgaaattccagttgataccagttgaaaccagtaaggatttccaactggtatctactggtttgaactggtctcaactggtatcaactggtctcaactggtaccagttgataccagttgatacaatttggaaaccagtagaaataccagttgacatctgagaccagttgatattaccagttgatttaccagttgctttaccagttgaaaaccagtagatgattacaagttgatttaccagttggaaaccagtagatgatcaccagttgatttaccagttgaaaaccattagatgattaccagttgatttaccagttgaaaaccagtagatgattaccagttgatttcccagttgaaaaccagtagatgagtaccagttgatttaccagttgaaaaccagtagatgattaccagttgatttaccagttgaaaaccagtagatgattaccagttgatttcccagttgaaaaccagtagatgattaccagttgatttaccagttgaaaaccagtagatgattaccagttgatttcccagttgaaaaccagtagatgattaccagttgatttaccagttgaaaaccagtacgaataccagttgatttaccagttgaaaaaccagtttaatgtatcttatgaatattcatgattaattcgcatgttgtcacagaaaatataattatcatgttctggtaaatcaactggtaattcaactggtaaatcaactggtcccagatagcgttgtttcaatttccatattaaaaaccagttgaacctactggtttcaactggtaccagttgatttactggttttaactggtaccagttgcctactggtttcaactggaattccgacctgggctttgaaaagtgtacctttttatcgaaatttcccaccgtcccttacaaaatgtactcttttggggtcatctaaagagccacatggagtttaaaagaatcgaagcaactttgtgtagtactactacaggttccctatttcaaccaccacaatgaaaggcagtgcatacagttgaagacaaggaagggttctttactctagaggtgttgttctagaggtgtcgatcacaaggtccgcggttcgagtcccgccgccgcactaatgtcctttggcaagatattgatctacatttgccacactccacccaggtgaagtaaatgggtacctggtacgaatttattcgttgaaacgcagcgcgcgtaacagctgcactgctaaagccagggtaattatgctgcattattgtagagcgcttagagacttctgataaagtaagtgttaggcgctatataagcaaggataattattattattattatcatctatcattgattactttgcatgtaaatcttgcattgtatggccaaatatataaacatatcaattatattctttttactgtactaacgctttaacatgccaaaaatctggaaaaattctcaaacttcaaagatatctttgaaggcgtcaatgtgtaacccgctctaacagtaaattctcccaaccatattttgaattttcccaaccgtttttctattaaaataagacataaaacagtcttttaaaattcttttaacacttacacgtttgaatggtatatagagccaattcattgccttgtgacgatataaattcacataagattaattaaattataatagtataatgctaaatatattactcattgcggatatagtatcgaaaataatatcgctagtgatattcgtttgtctcgcaatgtggtcaataaggaatctaaaagatcacgacgtttcgtatgctactgcaatacttcgtcaggtgataaaaactgttgtaagcaagggtcttttatactttacgggaggaccgtaaagcggtctaaaattcgatcgataattggaacaataacgcccaatgcctattggtcgacgcacacggtgatcgaccaatcaccaaggccgctggttcggccgctggttcagctgatgcaccaggcctattggccgacgcatacggtactcgaccaatcaacgggccgctggctcgggccgtctgctgaatggaa

SEQ ID NO: 51624 - DNA, 1519 bp, Oryza sativa
  unsure (1)..(1519): unsure at all n locations
tctttaacattattatatgacatgcatgacataaatagcgccgtctacagatctgaagatggctttctgtctggtaccgtagctccatcgtgcctggccaaacccgtaccctttaggggattcaatactttaagataagatgaatacccaatcactgaccgactttgcaaaaaatgtcctcaaaatttacagctgtcaagaaaattcgaaataactttagcttgctcaaaagtggcaatctttttacctagtacgtcaatgaaactagggagacataattaatccataaacgcatatggaaacgttttcttggatttgtctcaaaaactgaatgacactttaaaaccaaaatgcatttcctttctggcaattggagtacaaagaataattgcaggtgaatgaaacgctttaacaccacaaacacctgaaaaggaaatttgaatacatttagctgataaacgactccgcatacatatggacgtttagtggagcaagaaacactggattcttgaggaaaaaaaacacgaactcatttagcagaaagtcggtacgcaaattagatttggcgcggttgaaaaatacatctttctacgctgcgactttaatggtacaatctagtataaaattaagacagtaaaattgctcttttttttttaaatttttcatttaataaaacccaaaacttcagtggtattagacgaattaatgttttattctactaataattacaaatggtgtatacacattgtgaaactgtagcattttacaataaattacgttgattagcaatgatgatgtccttagaacctatttatttgcgcgtgcatccgggacttcagacgatgaagattattggtcaagcgtttatggtttcttttattccgataaaaatatacaatcaatcaaaacaagtttgataccaaaagaaagctaacaaatcgtttattcattagccgctcacccaaaatcagcctgaccacaatggaacgagtgagagcttgcgaaagcgaccgaaatgtgattggaaaccttgtatcatccgctcaatctgacttgcgtgcataaaacaaataagcatttttgcatgaaaatgtgatttttttttttttaaagtgcgtttctttcgggctttggggtgccagggtggcaattgggtaacctttcattaagtatgatataaaaagataatatgcaatttctctgtacttttgtcgggaaaaaacatgcaaatgcagcacaatgtcgtctcgttttgcattggagaagatcaaaatagctagtttcaatcatatggacaactgtctgtaaagtttggttaaaatgtgattacgtcatcgcaaagttatcgcccaaaatgatgtatttttggatttttttttttttttttctcccnncatcaaaaaaaaaaaaaaaaaaaaaaaaattcccatggttgacctaaaaaagctgaccttacccccctccccaacggaggaaaaggtcaaattttcaaatttcgagaccaaaaaaaaaaaaaaat

SEQ ID NO: 51625 - DNA, 2781 bp, Oryza sativa
ccacggaactatattctatctgaataaagtttgtcatgaccttgtcaggattgtatattataattaaaagaggttacaactaagaaatttaaaatgatttatatttcctgaattaaaagcgaaaaaacatctggatttcttgcaaaaaggtcggtcgatatgactttgtttctgaccccatcccactcccatgaaatcatgaactaaaaaaaaatgtttattgatcttcggtttaaagtccattaattaacaatttttcaggacaatgtttggatgtggttatctaagtatagttgagtgaaaagatgtccctatacccccgctttaatttctacaagtatcgcccactctctaccaaggttcaagaaaacaacggaaccaatgtctacttcttggaattgttccaagtaacgaaacaaacaatacaaaaatgaaaaggagggaatgttgacctttagtatttgatgagaatacctcgctgcacctcaagctacaaaagggtagggacacgtaccacaccaacaaaatggcggaataaggaagaagaaaaaacagagaaagaattaaagaagaacacgtgaaacgtgaaaagtaaatggtatgacccactcccagaacccatataaactttaaagccacgttatcttgaattgtatacacatagttggatcgatcccccccccccccacatcattggggcatgtaactcatacaaaaattgcaaacagatcacctatcccccccccccacaaaaagagagagagagagagagggtgagggaaagagagaggggtgatcaaaagaaaatgcaacccgatactaagacctactcccagaccttttggtggctctgttgccatgttccttgtatttcatacacacgactggtgcccctttaaatggctaaacccaggctgcgccactgccgcgacggacttaaaaatagatttaccgatttattgttcactttcacctcgagggctgccgcaacaagacgtgttttttccgctgtctgggcaacaattcgcttcttggagtaagaaattatattttacttctagtttgattgctggtgctttttctcttcttacttgtattatttccgtattttggtttggggtacgattttggacagtcattatgcatttgtttttgtcgcttgaaccctataccattaatcaaaagctgtttatgaatagcgcccctacagataaaactagctgatacaagcgcttcacattgtaataactaatgttgttttaacatttcagatattttgaatttaagcctgtcaaaagtgttgggaaccccaaaaacttgatagcaaaatttcacttaaattgtatcataatctgaaagaggatgtcatttgagacacattttttgaaggattttcaacaaaaaaatgtgtttggaatcgaatattgaagaaagactacaacatttaggtttcctgcgggggggggggggatctttacagaagtgtatcttaaatgaaatcctctttcatattatgattatttaagtgaaattttgacatcaaaacttcggcgaatttggggctcccaacactttaaagggtccttaaatggtgataatatggtacatgtattgtattgtatttattaaacttcattgacatacatcaataatctgtttataaaaaagaaaatcatataaatcaatttacaatttacaatgcaatgtaacgaaacattatactttttgtaaacattatatcatatcaatcaattcacaatgcagtgtagcaaaacagaaggaaaattgtatacagcagaaaaactcttttttcttcttgtaatcacatgacacatagtgcataaagtaaataatacaatgtaccataatacatatataaaacctaatatagcaagtttctaaataaattattactcatgctatacaaaataggcaaatcaggtacatggaatgcaatagataatcgtttcgcctaaaatgaatgacgtaatagtacctatatatatatatatacatatatgcgacctactgtgaaattaaaccaaacacgtaaggttttaaaacaaaaattgccttgtttatataggcggggtcattgtcgtttaatacagaaaagaaatatagaggaaataatagggttgtttacttgttatttaaataattgtataaggagtttttttaacttagtagttacatagtatctaacagttacccttcactgcaattatgtatttggtgatcgaagagaaaatatctattatatctttattgtctaatctcattatatatatcaattattcttggcattctaaatcactaacatcttcttcaaaattgctaatttttttcaagaaaatctattcgtaaatcgttatatttatcacatttcataatcaaatggaattcatctcctacttgattcatattgcagtcttcacagaatcgtagataagggggcgtttttctcgtcttttatattcctatgggtaagttgtgtgcgctcagtcgtagtttggtcatattttttctttaatttatatttggtatatgagatgaatgcttttcttgcttgattgtctgaaggttctgagtttatttccgttacgggtttccctatcatcgaataaatctagttttaaatgttcatcaattcgtctttccaaacaaagtttacatagctcgacagcatgttgttgacaaattggtatatttttagggtctaatacggtctcatttccattattactacaaatattaagtaaacttaatatatcccgaatt

SEQ ID NO: 51626 - DNA, 1829 bp, Oryza sativa
atccaaacttcgtatttgtatccaatatttgagcatgtttattgcttaaagtttattgttcaccgttgaggatttcttccaatgttcggctagattgctgcaatctttattataataaagtcctgttttccctgtattttctttatgtctgttgcactagctcccaaaatttctgatccataaagcaaaataggtcgtatagttgcataaaaaaggtataataaggctttaatcctgggcgtataattgcccaaagatttatacagtttaaataatgatatcatggccttatccgctaagtcccttgtcgccatttaaacgatccaatattactaaaaacaatgcctgaatattcattttctttaccgagctaagttttttcccttttatttaaatttcacttttatcatttaacctgcctgatttattaaatattaaacgtaatacaaagttttggtatgggtttatgactttggttcaaatgaacatattgatcgctgtcgcgattaaaatcgagtctgaagttatgcaattgtgaatattaaactctgtatgttgtatagatctctctcaagattgattttactttagcttcaaaacaatgttgttgttttttactaaaatcatgattataatgatatagttgtttcgttgaatggtaacattattgatcgttgttcttctttaaaaaaaattggatgtgactattgataataagttatcctttaatgagcattttgaagtcatttgcacgaaaatttctaaaagtataggtattctaaataagttaaagcatttcccacaaaatatactcaaaatgatctataattccattttgtttgccttatttttaatactgtaacctagcctggaattcctcggctacatattcaatgctacgtttatacagattacaaaaaagggcagtgagaatcattttgcatgctaattttcttgcccttacaaagccgttatttaataaactgaatatgttgaatatatttgatgtttctgattatgaaattgcaacttttatttaaaaattacataccaaacagcatttcagaatttttttcagaagttattctgtaaatcttcaatctggtcttgtactcatactctctttttatcctaatttcaaatgttcagtttttttctgtagatggcatttccttcctttctagctgcctcctcattcacataaatactcacttttgctatttttttgtccagatcaccttattttgtacttttatcttatgtaatgtttgtttattttgactatatatcttgtgactttgtatgttattgtatctaaatgttttttatgatgaatggaataaacttgattatcttatcttatctatctatcttatagtatggccgcaggcactatttgaaaatgttatcgggagcatcgataaatttgatattttaatttttcgaaatccttagcgttttagaggctaatttttcaaatttacttattttaacactaggtttcgcaatggtaatgaagattttaaatttcataatccaatcctgttgaaatattaccaaaattggtaatacctttaatattttacatccaggagttacaataaaacttgtactcacatgtacatgtacccgtctggcattaagattgttgaaatttctatttgattctttgtcttaatagtattaacttcatctctaagttaccatgctcaaaacttgttaatttgagtgactcaataactgttgtttgataaagattccttagatcgtatatctgaaatggccaaatccattctcttagacaggcccgaaactaagggggggggggt

SEQ ID NO: 51627 - DNA, 1039 bp, Oryza sativa
aataaaggtatataattattattcaattgactatattatgatatgtgtattttgaattttgttaatgtacctcggttacttaaatgatcagatcgaaacaaaataatgataatatcaataatgataatgatatgaaggtcgcataattcaacatcaaaacgcccaaaacgcccaaaacgcccatcaatgcccacactttgccactttttcaacaattaaagcttctaaatgtttatgatataaaattattgctatatgtttatgtgttctaagggattattgccaaggtccatgtcatgtaaatttactttcaattatgaaatacattcttatgaaacccgtaggccctaatgctggtaattttcattttcctaaaatccgtacaaatgtttaaaaaatacagtttttttcaaagggccagttttgtggaaaactatcccatttaatataaaaaaactctacttcactgaatatttttaaacgaatgtataaatcccatcttttattattgtattcaatctcaaaataaataacgtttcagttaatgcactttttaatgtgttccccctccccttcttcctttttttgttttcttcttttgtattggtgtttagattctctcggctttccttttccttttttcttttctcaacaatacagtgtatactttttaaggggttggcgttcataaggctaattgccctttttgttaaccccacattcccataaaattttgtttgctccttccctttgtatttttcttgtaatcgatcttttatctgtataccacgtttgtatgtttttaatgtttttatggagaatgaaataaatgaaatgaaatgaaatgaaatataaatatgtccttactatacaattctctttcgttcatggctcgtaatcgttggaatgatgagccacagccaaatttgatttatatgtttttgtaatacatggcaaactttcatattttctttggagcgtattgagctttgagctagcctgagtattaggaatttggaccaccaagattattatcgtt

SEQ ID NO: 51628 - DNA, 3182 bp, Oryza sativa
  unsure (1)..(3182): unsure at all n locations
tcctgcagcccgggtctggagaaaagactacgctcaatactcatgttcttccacaggaataagatgatggggtcttagttttgaagatttttaaaaagttttgaaataaccgggtctggaagaaaaactacgctctaaacctaaacccatgctttattaccgggtcttagtttggaagatgattgggtcttattnaatttttttttttttttttttttttttttttttttttaacttgggaataaccgggtctggaggaacgactaccctcgattctcatgttattccacaaaaaaaggattatggggtcttaaatttgaaaatttttttaattttttgaaataaccgggtctggagtaaaaactgcgctatacccatgctttattacagggttttagttttgaacaaattcgacaaaatatcacttcaaatttattacatttgggggtaaagtcattattacatttgggggcgattcaaaattattacatttgggggtgaaatcattacatttgggggtaaagggttattacatttgggggcgttattacatttgtgggtgtaacatcccctgtgtgtgactgggcctttaaggaagacaaatgtaattttcaaatacaaatggtataaacacttgaattcctagataggattttccaccaaaaagttaggaaccagtacacagacggcttcaacagggaaattatgttcacctttactttattgtggattcctaagtagaattcgatgcttaaaatgatgccaccgactgatttgtgaaaatctgtgcccacagttcccaaatcttatgttttaagggacccactattgtttgtatcgtgcatttgagaagaattttttaagctgaaaattaatgtttggtgtaaaatgtttggtgtgaaacccactatgaacaatacaatggtattaagacccacagaagacaaaaggaacagtcaaaagtactgctcttaactattttctgggggtttaaggagtacagtagatttccacttcagtataaaattacaagattacattgtggacattaggctttgatggccaaataggtctcacttacataaaattgtatttgaagagccaaaatgtattacatctgacaaagttatattttctttacaaagacatttataagtgtgttatagaaaaggtagttgttaatacttaatttaaccatattacattgtgctgaaccctttaatgatactcatggatacaaataactattcaccatgggtacctacgtaatccttccatcacaatgctttaggctgggccccacactaacttttttggaaggctgtccggatttcaatttttagagtatgaatgtaaaaacccatttaaaagttttaaatttgggggttccagactgaagtattgggcgtccatgtgtcttgggcgcgtgttagtgtcgagccctgcgtatggtccaatttcttgatgaaatcgtatatatgggcccaggcgcgtacgcaagggggtggttttgggggtcaacccccccctcaactttgttttatgtgtgtgtttcggaagaaacccccctcactttttttccagtgtaaaaaaaaaaaccgggggaaaaaacccgacgccactccccccccccccaccccccactgaacacaaaatcggtcggtataattgttcaatttccggaggaaaaaaatactctccccccttataacccccagaaaatagtttacagcagtcctcttgactgtttaaagtatctgatcctttaggacattttcgcgaagaatccaactatgtgtagtgccggcataatcatcaggtcatggttttgatttgtttcccttacaaattactattcattttcctctttaatgttctgctttcatattttctagtcttttgtttttccttcttcttttcttacaaagatctttctcaagttattccttgttattttttcttctccttcaaggagagtttcttcttcttcccatttggaacagtttaagaactgtatgagcttgactgaactttcatgccacatgtgtgtatagttccatagacacatttctgtgtgcaatgcatatgacttctagcatatcaagtccattcttatccattcaatgattataaaaccgcacagtatatgctggttcttatttacatgaacatgtattatataataaatctttcctaatggcttccacactgtttcttttataatgcattcacttgactgaacttaattttatcttgaaaagaatatatcccttacccctgtcaatggacctcttctttcttgtaggttcatccacgcattcaatctctgtgatcattgatacaaaatataaaaccggaattaaaatttcaatataaacaaaatatatatatatatatatatatataaacaataataataaataacatgtctgtatcaacaatttatacatttgaaggcaataaatcatataatggcaaactgaatatctaacattctttaaatttagatatcgtgatattgaatattttgatattatgcaggcctactataagaaaatattgtgatttcttgtatattcatgaagtctattactctttgtttagtttgctttcttattgttcctataaacaaacataaattactgtatgtacattctgtttttggtttaacaggggcctgctgtataaaaagcattcagagaggcaaagaaggcaaccaaagtgttaaaaatcaaaacagacaaacagatatacagtcatgcaattaaaaaagctatcagcacaattatcaaacagaacctcacttgtcctcttaccttcacgaatagcaacatccagacctgcgttggtaagtacagtcattccagaatccttatagtgattacaaaaataatgaattaaaaacaaatcacagtatctttatttttcatttttctatttgacatttgacaaagataaacattcaggtaaataaatgtcaattagtgtttacatccccctcctctccctccctctctttccctctctctctctctatgactatctatctatccaggcgcggatccaggatttcttaggggggggggccaaatttgaaattttgcgagccaaatattcgtacgtaaaggtgaccagcagtgacgtaatgcaggggggagggtgggtgcagggtgggggggggg

SEQ ID NO: 51629 - DNA, 1604 bp, Oryza sativa
cagttctcgactcctcgtctggatttagttgtaccgttctcgactcttaatccttgtcctaattcagtcccccccccccctcccgctcgaagcgcgaaacctttttacgtttcattaaatcattagagaaagaagacgattcgtatttccggtctcgactctaaatcctcgtctgaattcagtttctaccctcccgcacgaagcgcggaagcttttacgattcattacatcattaaaaaagaatacgattcgttgtacagttctcggctccttgtctggatttagtttccccccccccccctcccgagcgaagcgcggaagcttttacgtttcacttaatcattagagaaacaagacgattcgttgtacagttctcgattcttaatccttctctgaattcagtcccctcttccccctcctgcacaaagtgcggaagctttgacgtttcattaaattattatagaaagaagacgctgcgttgtaccgttctctactcataatccttttctgaattttaaagatgttctttgtctgctcctttatcttcctacgtcctcttcatgttctctcctctcttttttttttttttttgccgttgttttttgcgggacagcccccaccgcccccccccctggctacgcgcctgcggtcagataaacacattttgataccttgtccgaccccggaagctcaggggtttaaggcaatcaattgcggtcagataagaattcaggggcccgccttaggacccctggtcgagggtgttgagcccccggaagcttaggggttttaggcgtttaattacggtcagatgaacagtttttgttataccttattattttgtaacactggcaggacactatttggcgttgggtccagggggcggagaccccaaaatcagggttttaggcattcaattaccgtcagatgagaatctaagggcccgccttagggccctaggtggaatccatggggcagagcccccgaaagcttaggcgttttaggcatttaatcacggtcacctgagcatattttgatgcctcattatttgttgacactggcaacactattctttctttcttgctctctttcttttttatttctctttaatatactttttttttaagtgggggtggaggctcccgatccccgccgttcctcgggccctgacatgtaggaatctcaagaatcatatctcttgcgtggctgtaaattcaggaatttgtcattttccaacaaacgcataaaaagtataaagtgaggaaattatgtaatttcagcattatttgtaatccaccgttatggaattagaaataaaacacgtttgaatttgattttccccaagccccctcccccccccctaacagtacgccagtatctcctctttttatttttttctttccctttccttttttctctcttgtttttttgattggggggggggggggacacagcctgggaggcaaggccctttcggccctcgatctccttcttccccttttcttttcttcttcctcttctttctttccctttctctcctctttccctttcccttcttttcctttcttctctctttttttttttgcggggtggggggggggggg

SEQ ID NO: 51630 - DNA, 3315 bp, Oryza sativa
ggggggggccaaggcccgctcggccccccctggatccgcgcctgtatctatcttcctattattctctctcagtaattgtacatgtatctctagtgatctacttttagtgcccttttatcccacagcacagtgtcttctttgagtgatgtttttgcatgctaataattacaaattatatatgaaaagaaagagcaaaaatcacagataattgtgagtctatttaaactgcagtgcgatgtgtcattcttaaatatcagcgaatttatttgtaacaaattgattttttttttcgagggggggggttaattttgtttctttcacattggtttttttactaaatatttttaaaaaaatcaaacgaggaaggagtggaaaaataagattaattgttgccaatttgaggaggaaaagcttaataatttagaaattaagaaaactctaaactgctatgggttatagtcatccacttggttctcgtcggccttatgccaaaagggccttaacccgatttggggggttattgagttattaacatcaccttgtagatttcaccattctctttaaaatgatgtgcttcacttgataatttagaaattaagaaaactctaaactgctatgggttatagtcatccacttggttctcgtcggccttatgccaaaagggccttaacccgatttggggggttattgagttattaacatcaccttgtagatttcaccattctctttaaaatgatgtgcttcacttgatgaaattcgatttatttatgaagataattatgaatttcaaaagggccttaacgcgtatctcatctttttccttacgccaaaagggccttaacctacacggcaaatcttttatcaatgacagattatttcgtaatttccatttaattcaatgaatatcggtagaaacaccattaaaaacatgattagtctacaatagacagaatgtacttaaaataatcagtgaaagtatatgtcgtgaatttagatcatgaaatctgagtgaaatttaaattaggtgtggatgcatgaaatgcgaccgactcgttggaatacgcagatgtcaacgtatgggactgtgatgaaaataaacaacgaaaaaggtgtcctaaatgtacgatctctaaaaaataactttactgaaagctgcattatattaataaaaatattcagatatcaaaaatacttttccaaacattttaattcatcagttttatcagttttcgtgatctagtagccgtaggaggggctttctggcaaaccaaaggtgttgcgagacaagaaaatttccttatgccagaagggcgctaactatgcgcgcgtacttttggcaaaacgccgcgtcggttacgccccttttggcataatgccgagtaggataaggcccttctggcataaatacgctacattcaagccttatgccaaaaaggccctaacgtgttttttttgcacatagcatgtacaattctgaatattttataacacatttaacacatttcatgtaaaacttaataacttaacacatttaccgaaattggcttcaaaaacaaaaaaagaccacaaacttttgattattagagaggccaaaacctttaaacgcgattatctcggaatggccaaaagcagttaaggcccttttggcataaggccgacgttctatttcttctgccctatagctcgactatatatgctttttatatatctgacttgtcttcctctctaatttcattgcagtaaatggctgaggtgtgaatgttttaacagtttacattatacaatatcatacaatcacaataataatgaataaaaaatcttcatccttatatatttaatttttcagaattttgcttgatattttccacttcatgtcccagtgaacattaattgttatgaacatacacacatgcacatgtacactctgtaggcctaatctcatcattgtttattaaaccatcaattttcatgtgcatggaacttttgcgaattacgggaggggtccagatctgcgaaattgaaatggcacaaacatttgtggttatagtcgccattagtcgttcaggtgtttagtatatatatatatatatatatcgaaatctggaggtaaacatacctaacaaaatctgcttaaaactgactaacattatactaacgcttcatgaatagcttatttttaaatggaatttgctcaatcctacagtcctacaccaatcccttttttctcatttttcttcatctttttaaaaccaactaaatatcagggttatattttaacccaaataagactggaggatgattaccccccaccccctcttctatttttgcaatgactttgtaatgcttaaatattttacggtgccacttcgtgactgtttttgtttagagtcttgcgcatattttgataccaaatttgcgcacactgggtcaacggtccgggggttatgtaacattttgtgatcgtgtgttatggaattaaaaaaaaaagctcttctatatataacagacagagtttttagatgcaccttttacactgtatgttgcagttttatacctaccttttcaaatgtgcttttagtattcccatttggcatggtgaataaagcttattgcattctcattcgcataaaacgatacaatatataaagaataatacaaagaataaaaaagactaaaaactaaaacaaagaaaaatataaaaacatagaaaaaacataggaaatggtaaaactaaatcaaaatcatgattatcctgttgctatctttaatatttgtgtaaaaagtgaaaatttgtgaaactttcatatttgcataattagttagtactaattacaagttgtagaataagtaattaaaacaatgtacatgtacatgtatgcatcatttagatcatatgaaaaactatacaaaagacaaataaaccagcactccaacataaagagggagaatgtctttcatgacttcacatgaaatcatcaccaaaacacatgttcatgataaatatgacatcataattattaagttggataattaccatatcaattacccttttttaatcagagattgtgtaaatataagcttagcatgtattttgcaccatgaacacagttttgtttcataagaatcaacatatattaagaaaaatacactaaataccaaaaaaaaatgcataattattaattctaattagcagattctaatttgaaaaaaatattttaactatgcactattttagatctgatggacatctatcaccatcccaaatttgaagtcgatcggagtttcggttgcagagttcttaggaggggagggggg

SEQ ID NO: 51631 - DNA, 693 bp, Oryza sativa
atttaaaccatgccaatgcattctcagagcatcctatcatagaaagtttgttcagcaatacatcgtagttaacagaatcaaaggctttacgcatatcaataaacgctaccccacaaaatttactcctatcaacttcggttgcccagtcatcaaccatacacaatagagcactttcacatgaatgctttggtctaaagccaaattgactttcactgaagaaatcgctatttaataagtatgtctgtaaatgcttttgtacccatttctccaaaatttttgaaacaattgacaataaggatattggtcgataattttctatacataatcgatcaccgcccttaaaaatagggcgaattttggccaagcaccatgcttttggaaaatgcccttttgacaaagaaaggttgaaaatataaataagaccatctattacatttgtggcatatttcatcattttcaacattttaacagagatgtcatcaggccctgtcgctttttttacagaatggctatcaatttcttttacaacaaaatcgtaggtgattggaggagtatcaaaaatttgacgatcaacatgatcaaggtcctcacaattctcctgtggcaatggacaactgacaattacatctggaattgtggtttcactagctctccaacctgtttttcccaggagttctgaaacactatcaataa

SEQ ID NO: 51632 - DNA, 1172 bp, Oryza sativa
ttgtgaattcgggccattgtgtctggaagccggatttttaaaatcaaaagtcaagggtgccattttagacgccattttatactctgcatgattgtgttattatggacggctgtaagtgcgacatcacgcgtcatcacgtgttcttcattaaccaccatcccattcgtcttgcacgcagtgctttcgagtcctatctaggtcccttcctttaatccgattcctttaaaagttcgtagtcacattttctaggatcccatcaaggtcactgaattcttctttttccggaatccctcttgcctggtcgtcaaggcgccatttcgtctgaattttaaggtcattttgcctttctttcggcctacctatcgccactatcctaaatgctacagacttctaacaaattgctctggatagtccgggggaggctcgttcgtttgacaagtagaaacacgggcgtgaatgcatgcccatcgttctgatacgactgcagtactagttggtcaattgatttcgtgtgaccgcgtatttttctgtcctcgacaagtctccgattcattatccattactgactgcgtgcagtgcatattcggtatgtgagcctacattaaaccgaacgtgacaatatccaacatttgtaataagttcatgttttaagaagggcagaaaaaaaaatggcgaaagtttaaaataaattggagaaataataagaaagttatgaatgcttggcaatatgtaatcaatacatttgtgcaaatctcaatttgacaatttgttcaaacatctgattggtgcccattttgaataatgattaattctccttgtcactttggttgtaaatgcctcttaaaaagttcctctacctctatgaaccaatgtcgcttacaaatggtgcccttttacggtcacctaaagggctgtaggacaattaccccccggataattaccccctcggaaggtacccccccccggaaaaccactccaaggacaattacctccctgaaaaatgaccccctaggaaaatgaccccccccccccccgacgacaattaccccccgaaaccaacttattattagggtgaacttcccctttaataacgaagtgtgccccttttaaaatgtattatggtcgttttcaaagctatcaagcgtcccttctttaggccgaggtaatcaagg

SEQ ID NO: 51633 - DNA, 592 bp, Oryza sativa
tatcatgcttggtgtataaatgtgtaagtggggtagcaccatcccagttaagtagtaaatttgttctaaatgacaatgtctcgacacgtgtaacacgaagcaccaacaggttgttattacgtatccctcaatgcaaaactcaattttatcggaggacatttgtaccagttagtgtaaatgaatggaactgtttgtccgatgaatgccgatctgcccagtccttagccattttcaaaaaatgtatcaaacctggcaataaatagctttttttaatgaaggtggaggagggggttgcagtgaggtcaaattcatcttatgcttgattttaatgtaatttttagtttgtaacaggtggtaaacaggtgtgtgtgtgtgtgttagctttcgttacccctgtcatttctatatataatattgttcattgtcattttatgttgttttttaaacagagccctgttgtaaaccagcctattttaatgtttttaacaatgttttgtaatgatttttagctgaacatgttactctgtataaagatgcgaaataaataaaataaataaataaataaatgccgtcgaggaaaatgaccttttgc

SEQ ID NO: 51634 - DNA, 612 bp, Oryza sativa
tacctcgatggatgccttattttacaaggaagtggtcatgattcctggtatttaaattaccttggttaagggagaaatattctcataggtgcgagttcgttgcttattttttgtaataagtgccctattataggactcttgatgaaaaaaggaaattcctgcgccaggcttgaatagtaatcaatgacttaggcatagtgttgaggttaggggttaccttcgtttgttatgggctacacggaaagtgatattcatagcaggtggtgatagccctgtctgccctttacatccctccatgtttggatacatcatagagctacaggcctgtaagttatgtctagttaattattccattgctgtcctttctagccaaagcgtaccattagttattgtccttggataaaatctctttccttgatatacacaccccttagctatgattcgatacactcagaatactctaaagctgaagtgctacatcggtatctgtgcgcttgcgggttgatctgtgaccgtaacaaatataaatacctacccatcaacgaaggtgtttagtggtacgtggtttgagcacggaagttgaacttgccccaggggattaaaaaaccagcg

SEQ ID NO: 51635 - DNA, 919 bp, Oryza sativa
ctaggattcaaggaacctgatgtgtaggctagttatcacaagtgttgtctgtgctaccaaattaaattgtgacagcatctttgacagggatattgacctcttaaacaatctgtagtaacatcatcatgctcatatagtcttgactgaattgacccaagtttaattacccaaggcagagggatctaaggatcgaagttaatttagtctgtttgcccattgcgtctgcaatgggttttcatttggtcccaaagactgatgactttcaattaaatctttggttttttttctattaattacatgtaaccgcatgtatagtcttttttttttttaaaaaaaaaacttacatgtctagttatgaatctttagagaagcactttttaaattttgtatgtttaaatttgacaagtttaagctaggctaaaactatgtctatattcagtttttttaccaatatatcaatattcagttatgtagaaatatcttcaggatgtcaatattctgaattacacagacatggttttagatgtaatatccaggaagtgaagagctgaattcacctacaagctgggagttctttgatatgccaaagtgatatctgaatcagcaggcatcagggatgcagtattgtgctgcatacatgcccactgaaacccattagctctccagattgatgattttcagagttcagagtgctgaaaatatacactttgattttttaccccagtggagcaggcagagagagcaacaatattatcataatctagagagagagagagagagagagagagagtagggacgttacagtagtatatatttagttgaaaatatgaatcacagcattatatatctgattaatatctcatatatctgcatctgcagtgcacataaggatataagatttgcagtttacctagtagta

SEQ ID NO: 51636 - DNA, 3114 bp, Oryza sativa
tcgacttgaagtagaagaaagtatattatttttatagtaatatatgcattaggatggtggccaattgatggatgtttttatttctttaaagaatttttaacaacttcttattattcccctcgaatataactagttttactttggttattactatataagcatacaaaccattattcatgtaattacacagttagttagttcataaatattaataatggtttggaattagtttcttaagtgtttatttgttttccttcaaagtaaactagatgggtagcactagcatccatgcaaaattatgttttttttacagatgattttcttaaattttgttaaacagtcatcttgttgtcttaccatattaaaagaaattgaatatcgggtttctagttttacagttttaaaagtcacaccagtcgccacctatgactcctttgtcgccccattatttacatgtccaacatgtcatggcttctattcattcctcctagagacctttaaaaattgtaccttgtagcttttagaattcattgctatgacaggttcccattttattgtttttagaagccccatcaaacgctgccactgtgctttttttatggccagcccgctactcacctctttattgtcattgagattagaaaaatcaaacatgatcatcgttgggattccttttcttacttttagaagtttcatcaatcgcactgatcctactgctttactacctgccaaccgcctttctagattgtatttctacttgaactcattttttctgtttttggaattttttttattttgaatagtattagttaaactcatgttgtgttctacgtggagtgctttttttaatatttcttatttttattccgaatatcagttatttataaattgtaatcctatttgaactattgattttatttttgtaatttttgaatttatttcattatctatttcaaattttaagttgatcacgttttgtgttgtagatgatctcaccttttaatattcattttttattctgaattttagttatttctaaattgtattcagtactatggaacccatctttagtcccgatttgtaaccccctttagtcccaagttacaaactgggaagcacaaagcgggactaaagacgctcatctttagtcccggttaaaataactgagattaaagatcatttttatctttagtctcagttggtgttatcaatcgagactaaagtgatgatctttagtctaagttgataacaacaaccaggactaaagatgctcggcgacctgacacggcctgacaaaaagtcatttgagtcattcttggtaacaccaaccaggactaaatatcatgaagtcctgttggagtttttatttgaggctaaagatattctttagtcctagttcctattcgaatcgggactaaagtgatttctctagtagtaactcctactagaaattttatttttatttttctgatttcagagtttatttttttattctaaattttaattattctcgatttatgttctagatgatggtttttttttgcaatattccttttatttttattccaaattttagttatttttaattttttttcatgattaaactatctttttctttttttcctaattttggaatttactttattttttattctcaattttaattattctcatataggataatattcattacttttaaaagtaattccaaattcagttatttctaaattatattccttgctgaattctctttttctaattttcaaatttattttatttcaaattttaattaaactcatgttgtgttcaagatggactgtcgtttcaattttcctttttttatacttgaactctctgttttgttttttaactttagtatttattttattttttattccaaattttaactaatctcgtattgagttctatacagactcttctttcaatactacttatttttaatttcaaattttggttatttctaaattataatcctacttgaacttttttttccgattagtgttggaatttctagtcttcaaagtgaacgtagtttcttctttcaaggttttcttaataatataatatatttgaaataagacaacaactatatacatttaatagtatcaagattgtaattttgtcgtgtgagttctaaacaatgagttaagtatgattatgatttgcgtctccagaattgatcgatgagtccaagtcaccatatcattgctcatagtctggaagccaattgttgtctgattggttgctcaatagcatcctccactctcactcctcagcccccttttgtttcaccttaaccttggtggcttggctttgttcgtttatatgggttgggaaccatctcgtacgcacgaaaaacgaaacggttcattagcgcgtgattaattatatattagctatttttataaaaaaggatcaatatgattttttaaacaactttcgtttaaaagtttttgttgtaaaaaatgcaccgtttagcagtttgaaaagcgtgcgcacggaacacgatggagagaggttgagaacactgagcaaagaacacagctagacttttaagataacattttagcttttatgtttctaaaccggttgcttttaagccctttaatttgttggaattaatgaatgggccttagcccactcgaagattaattctttggaaaatcacaaaagcccacctcatgggatggcatgcatgtggagtttagtaccaccttgcttattctaggagagggggacctccttaaaagggaggatgccctcctagccacttgaagcatgtgtggtggagagaagaggggaaacacacgcgcgcgctcgctcgcctcgccgggccgggccgggccggcggcgcgcgtgcacgacgtacgcgtcgaatggtccgaaaaattggctcctcacccttgcgcagatgcagcctccttttgcagttttgttttgctgcaaattcggattcgttttgttttggatccggataagttacgcgcgacttatccggttcggttacgcgcagtagagatcgtgcgggcgccctgatcaagcgacccttctctatataaaccgacccgccgtcttcacgcaatatatgcgaaa

SEQ ID NO: 51637 - DNA, 1134 bp, Oryza sativa
gcgccacacgatttgacgttgagcaaaagggtcagatttgaaataagttttggcagcggttcatttgtaaaaatagttcttgcaaagagtcaacttgtcaaaatttgtgcagtttttccatactgcaccttccttcaaattaccagtgaaaataaccgggcctgattattttgatggcccagagaaagcgatcctctgacttaattactgtgtagttgagagtcactgacatgtggacgatagtaaagtaggaccacatgttagtgatttaactgcatgctcagttaagtcagaggatccgtttccgtggctcaggatgaaacttgaaataaggacccttaatactatatctaatttaatcaatatgtatacatacatataattaatgttaccggtaagcattgaaattaagtgcaccaaaagcaatgtctataataaaaaaaacttcataaatatttccttattaaaaaatatttttagatataaaagcatagattaattcacacattcttttttctgtaaaagagcaaaaggattgcatgttaattagaagaaagcaaacattattagtacacatggtgatcacctggaagccatagcagacaagagacacgaaccagttaggatagcggcagattacagaaaatttaaagagatcctatgcagtcgattgtaccataccattatcatttacatgtagcgactgcagaggatctcaaaatccgtaccaatattggtggttgcaagcgcggagtgtgtgcatactgtactatgcctaacatcactgattgactatataattgtctgactgatccggccacacggttgtttcagaacagcactggctatacccaacaacatgtacagactagcaacacattttttagctggatttaagtatgtaataatacatatttgattacacaaaccaatgcttaaacaagcatttcagatgtcaaagggcatgcagtctagtggttgcagtggccctgttcgataggctaagttcctatctatctattatatactaaaagtccattaaacttcctacaaacgcttttaagccgccacgtgtcacttctacaaacgctcttaagtcgccacatcgcacaatctaatctcaccgtcgatttt

SEQ ID NO: 51638 - DNA, 1173 bp, Oryza sativa
caaatactactgctgttcttcccatatgtatacaaacgtacatgattgtgaaaacaaaacgataaaatttcctaatcttcgctagaagaaaacaaatacacatgtatacataaaaaagacagagaatttatatatgcattcataaaaatcaatggtctttttaaaatatgattttctacaatataaagataaaatatattacttcacaaatatcaatatgtttagttaaactaagatctataataaatatttaatcaatgttcctttaaaccatcttctaaatcaatctattatatactaaaagtacattaaactttgtacaaacgcttttatatcgctatatggcactcaaataaattagagaaatcattgaaatcttttatatactaaaagtctattatatatctgcaaacgctcctacattgtcacgtggcgctctaataaaattagagaaatccaaaatatttagagtaaaaaaacaaaagcatccaaccttatatttttcacttaaattagtagacccgttattttaagcattggattagagctcttaaaattcccatgccgctaatctctatctcagaaaaaaaaacataaagtgcttatgtcgtacgatcgcctccctccccaaaaaacaaaacttaaatacctggaccatatacgatcgaaaaaacagttaaagccaaaaaaataaaaaagaaaacatgcactagaatcagaaagaaatactaataaggaaaaatcatcagtgtcggcactgatttgttgtcaacagcctttaatctatgattttattaaaataatactacacagttaaacttaatcataaagtgataaatatatcattacaaatgacaccagcatgtaatagcaaatgcgataataatgtttcaaataatttcatatcatattttatggtgccaaatatcacaaatataaagcgttaacttgaatctacatatgtaataattaaaataacaaaacctagcattttttaagtacatctatttaggtttatttaattttagagagattgagattctcaaagtatttggaattttttcaaaacttttcttatttgagctgtgagaagcataattaatagattgatgagaaacattaaattaaattttagccagtgataataaaacaacataatgggctgcaggaatt

SEQ ID NO: 51639 - DNA, 693 bp, Oryza sativa
tgatttttggagaaaaacaattttggtaggaaaagaaatttcaaaggcaattttgaatttgatttgaaaatttaaaaactgagtttagggaaaaattttgggattttaaactagattttgaattagaatttcaaaggaattctgtgagcaacttaggagggatacaccgattttataattcgaaactagtgattttcatttcgatggtaatttttggatcgagattgggatggtcatagggagagatttaattgagatctttggcacaagcactaagacacactaaataactgaatttgttgaattaggtttttattaatcatactatcaaatcatatacagatttattttccattataaaccaaattaattccctccattttgataaattcgaggtactattttatcaaaagtaccatgagttacctccaactgtttatatgtgaaatagtgctacctagcatgcaagaaacatgactgtgagacaagaaactaaggtaaaaattgttatagaaatttaagaaagcaaagttaattgtggttgttttactctgcatttggagaatcctatctatcaaattatgtgcaagatttcttatgtgtgcttgacagaggttgccagttgccaatgcaatcaatacctgccttgtatttgcctcgacgaggactctaatatgtggttcttataatatg

SEQ ID NO: 51640 - DNA, 689 bp, Oryza sativa
gttgagggaccttcggggacctttttccttcaccggccggccacgccggacaagctacaggtgcggcatgggctgtaaagcgcatggagaggcccaactctctaacagttacgaataaattactttgagtttggtcgaagtcggttatagacaaatataataatatttatattactaaattaattttattaaattaataattaaatatgtttttataataaattaatcttaggtcgaaagtattactatttattttataaactttattatacttgaagcagtttgattttaaccaaagttaaaacattttataacttgaaacggagggtgtaatgtatttgttgattatcactggattttcaaagaaaaaggaaatcaattcattattctattatccatcaagaaattaaaacgaaagcagtcagcagcttagtcaaagggaaacgtacaaactaatgtccaatttttgaatcaatccaactcagaaataaccacacacttggcattaatcaaagggaaacaatcagaagcagcagacacagaaaggtagcgaacacaaagagccagccaacaaagccatgcaaagaaattaaacacgcattaaccagcacttaaataaacttaaacagcagatgaagaagccgcagtctcgttgtcggcggcggcggcggcgggcgtggagacgatga

SEQ ID NO: 51641 - DNA, 736 bp, Oryza sativa
  unsure (1)..(736): unsure at all n locations
ttgtcatgattatagaggggagcgtcaggatctccgaatccccatgatgttcctgtgacttccatgtcgctcgccctagctgtgccagcctgtgcgcgcgggggctccccggccgcttctcgcttgtgttgccgccgccagcgaggccgccggtgatggtagtgctggcgacggcggcggctccctacctcttcccgtctccttcttcatcctttctcttctctccctccctccttttctccagatctggggtgtccggcggcttgcctcctccacccagcgccagtggccttcgtcctcgggctagcggcgtctcctctcccggttcgacgacgagggccgcgcggggaaccggnntcggatctggccgcgtaggcccagatccggcacctctcctgcagctccgcaggtcctggcgtgaggccagtgcaaaccgacggtggtggagttcgggtggcgccggcaagctccgccggtccggcgtggtggctgagcaggtcgtcaacaatgtgcaggtggttgtgtgcatataacagataccttcgatgtgcaagtggcatttggtggcttccattgcggttactttgtttggatgagactccaaggtgaaagccttactcggcttgctgatgctaacaacggtgacgctctcatgcaccgttcaccttcttgaaggcattgctattggagccctcattcaactccacatcaaggggtttctccgggtgaaaatcct

SEQ ID NO: 51642 - DNA, 719 bp, Oryza sativa
aaccctagaacccctttttattggtgaggacacggagaacacactccgcaatgttttagaggtaaaatttatttagcactttgcattacttgagttatgcctaacaaacttcttttttttttgaaatgcagaaagttcgtcaaaggtgccggaaacttgtagcaagattaggttgcaggtcggttggattggacgacgtgtaccaaccgtggagactaccaccaccactacctcaatccgcgcgtccaagtactgctcgacactccatcaggatagaagagcgtgaagaagttggtggctcatcatcgtcacgcattccgcaagggaggggaaaggggaaggcgccggctccacctagcgacgacgatgacgatgacgacgacgacgacgaggatgaggactacgtcgcaccagacactgaggagatagacatgtcgtagcttcccgacgcacctcaggggacgcaacccacgcaatacaacttgcgatctactcgggcagcgaaaaagaggtaaaatgagcttaccattctaaaatgttatttgatttccctcattttgtttttaatatgttttaaacattgtattttcaaatgtaggtacactccgggctcgcaagcaattcggcgccaatggaagaagtgatttgtatgaagttaatctatttgttggtagtatgacatatgtggtgcactatgtgatataaaaggtgatggacta

SEQ ID NO: 51643 - DNA, 564 bp, Oryza sativa
tcaaattcagttcaaacttgctttgaattagttagtaaagtagttaatgttaatacctaagtaattgaaaaagattcatactcatttgaattgggtatatactcaatttcaacaatggtgcccgggcaccatggagcaccaaacaaatttactatatatatatatatatatatatatatatatatttaatatcatcataaaattaaagttgcgactgctcaattaatagcaagccaatgaagaacataaaatgttgtattttcttctccaatccaagccaaataaaaaatattacagggcaaatggacaattaacaaatccagatctctataatacgaaactctcaaatgtatacgtacattaactgtcaacatctatttcgctggtggaaaaccatgcaagcagatggccaggtcattctttttgggtgcaaagaggatcgttgctcatggctgcgaaaacctcccatgcttgttcatttacgtgctagtgacagaatcagaattgttaaccagcgaacaagtgatatccggcccttcgcatctcacttttccaatgtcaaat

SEQ ID NO: 51644 - DNA, 5521 bp, Oryza sativa
  unsure (1)..(5521): unsure at all n locations
gtatccccatctgaggtgcatgagcacctctctcaacagctgccatgagggcttctggcaaagaggagtcagggagtgctttcttccagaaacagattgccggactagcgccggtgctggggttgccatgggcaacccttgcagcgagcaacaccacaatgaaaagatgcatgcttatcgatggtgtgtgggatttgatgagaggtgatggaggtcttgcgtttatatagcctcaagggaggttgtgggtgcaggtgatccttagcgatcatattagatcctagcttacacctccttgtcacccagtaggactaaaataattaaaggcctgcagctcaaccgtcatacttccggtatttgataatcagaaaataaagtgttggtactgtaccactgagttggcatccttatgtattgatataaaaaatgtataagtggccagctagctattgcgaaaaaataagtagatatatacaagtcattatatagctagtagtcttgttcctaacaccctattcctgctagagtttttgtgactggccgtcatagtagtgtacttctcattattatttttttaagtgatccgtgcaagacagtgcgaagtttcatattgttataccagaaaaaattataagattataatcctgaaagagacaaacaaacacacaccacctttccttgctactagcttctcacacgatgtcaaaaacaaatgaataggcacttgtacaaaaccggccactgctaagcatgaccgatcaccgcaagacctacctagctagccggctgtcgtccaagtgctgtctcctggctagcccctacaacctaacaagtcggcaccgctgcctccaactttggactgccctttgcgcctcctgccttccgtgctgcgccgtcgagggaggccttgccaagcaccatcggggaggcctagccacaggttgtccaggccgcgggagaagccacagacgcctgctgcaacactctacctgccttccggcactgccggtcaggttctgtccgccagaacaactcccgtgtcgcttggatgtgctcgagctggctacacatctatcactgccccgactttcactagtgagccaccgccttccccgtcgcagcatcgtgttgtcgtcccgaaatccttgacatctcgcatgaaccctagaggcggtggtagtggtgtggtggcaggggtgcaacggcagggattgcctcccatgtcgccgcagccctaggttcgacacgggagcttggctaaataattggtagatacccctgattgattattttcacttaatccagatggttctacgccgtcaggaaaacccattttcttgtaatgaagaagcaagcagtgttgcattagaatnnnnnnnnnnnnnnnnnnnnnnnnnnaatacgttatttgacattggaaaagtgagatgcgaagggccggatatcacttgttcgctggttaacaattctgattctgtcactagcacgtaaatgaacaagcatgggaggttttcgcagccatgagcaacgatcctctttgcacccaaaaagaatgacctggccatctgcttgcatggttttccaccagcgaaatagatgttgacagttaatgtacgtatacatttgagagtttcgtattatagagatctggatttgttaattgtccatttgccctgtaatattttttatttggcttggattggagaagaaaatacaacattttatgttcttcattggcttgctattaattgagcagtcgcaactttaattttatgatgatattaaatatatatatatatatatatatatatatatatagtaaatttgtttggtgctccatggtgcccgggcaccattgttgaaattgagtatatacccaattcaaatgagtatgaatctttttcaattacttaggtattaacattaactactttactaactaattcaaagcaagtttgaactgaatttgaacttgtttttgttagattttgattctaggtatatagcatccatacatataattagttaggtatgtaatcatggattgtgaaataaagttaaatttgagttgttttgttgataggtataggtatgaatcgaattattataactaggtatatactcacaatttgaaattttgaaaattttgagtgattttatacattagataccatggtgcccgggcaccatggtgccccatatgagtgtcctatatatatatatatatatatatatatatatatatatatatatatatatatatatatatatatatatgacgaggtaactattgcacacaaaagatgtgtatatatagtagtcttactcataacacgatctttctattaaacctatcgtgacattgtctattgtactcgtgatgttttttcacttaatcccgatgttttcccgccatgagcaaaactgttttcgcgtagtgatgcagggagtgtttcatgttagaatatattatgtcaccgatgatgaaactagcagatacgatcgatatttagcattggaagagcaagatgttttcggttagtgatacaaggtttcgatttgagtttcaaagttgagaaaataaagtatatacatttatgaagcaaacaggggccgatcgatctagcatgggggtggcggggtctcaagccctcactattggcgtgaggaccatggagcccgcacgaagccctcgctaaaattgtttgctctatgcagatttaaagagagctatagctttgtttagtttgtttagatccgtcgctggaagcaaatagtgttgcgtcagaatagattatatatgcaaccgatgatgaaaattatgttatttgacattggaaaaggggatatgcagaggcctggatatcacttgtttgctggttggccaatcgatcagattctgtcactagcacgtaaatgaacaggcatggcagctttcgaagccatgagcaaggatcatctttgcacctaaaaaaagacctggccatatgcatgcatggttttccaccagaaatagatgttgacaattaatgtacgtatacatttgagagtcttgtatcatagagatctggatttattgtccatttggcttggattggacaagaaaatacaacgttgttttatgtgcttcattggcttgctattaattaaggagtagcatccttaattttatgatgatattaaataggtctatatctctgctattataaaaattaaagaaatatagatctgtgtttgagtatgtcatccgtgtttgagtcggtttttaagttcgttcgcttttagaaatatagatccgtgtttgagttggattttaagttcatttgttttttggaaatacaaaagagtcgtataagaaatctttttaaataaactcgcatgctaacttgagatgaaatatagacttctaattgaagcctatgattttcttaaaaaaaatatccaagcgaattccccctagctaaaccatataacaacagcaaaattaaaatggtatttacccgttgcaacgcgtggtattgtttctagtgtaccccctcccacctcccatccgtccccacctccctccctcccacgccccctcttcctctctccctcccgtcctcccgcgtcccctctccctcctcccatcgctcctcccctcccatcactcttcctctctctccctcctcccctcccatcgctcttctttctccctccgtcctcccacgccccctctccctcctcccgtcgctcctctctccttttcttctttttttttctctccctccttcttctcttttttaaaaaaattaaaaataaattggtgaattcaagacttgaacccatgatctcatggttcatggcgagcacttctaaccaaatcaccatatgatgatttgttaacaaatcaattatgtacctgtaataatcataccttgttactatgattcgacagtaacattatcgcagaagggtagtaacatcatatgttactgcaaaaatgtataggttgttactgtaaactttataggttgttactgcactttcagcagtaacagagaacatgcatagtaacagtggccctatagtagtaatgttttttagatctagagtattttaaatatcaatctttagagagtactaacgtacatgtcatgtcttatttttctaactcatttgcatcatggcgttcataaaaaaaaagttcttaacgaaactagaaccataataactactttttaacgttgttactgcgaaaaacagacgtgttactgcatattagccgtcgtgttaatacgctgttccagtgagacgaggactaaaaaagagataaatctcaatctttagagagcaatatctctcacatcatatcttgtatttccaatccgtttgcaccatgaagttcataaaaaaacgcttaacgaaactagatccatcatggctactttttgacgttgttactgcgataatgttgtcttgttactgcaagatgaccgtcctgttactgcacgattcctgcaagacgagagcagcaaagtggtgggtaggggagggagtggtgggcgggtttgaccggcgggaggacactttgaccaaggtgggaaaggggttttgggccctagggagggtggggaaggtgggattggcccatgggaggggggtttacaatagttattctaggggaggggtgtacaatagattcactatatatatatatatatatatatatatatatatatatatatatatatacactagcaaaagtgcccgtgcgttgcaccgggtgattacggagtgtgtatattgaccaaaattgttgtttagtttagcaaaagtgcccgtgcgttgcactgggaagcgcacagatcagtaaaaatatgcaaattaattaaaatacaaattcgctgaaatatttagtatttttaagtaggtatgtgtataattaaataaatttacaagtaaagcaagtgcgagaaataaaatgacattgttaaatttaattttattaaattctccatgattagttacgctctttggaattttattggaattttcagaacttaattgctaattttaataatacaaatatcatttaataattatttaattggaaaaagaaagaaaatccttccttttaggtttgcttagaaataaacacatttaataactataattataaatgcttctgaaaaaatgaagcactaacttctcttttttttttcggcctgagggacctaatacagacttatttctggcctgagggacctaaaatagacttatttccgtcccttccggtcggcccacggccttatcaaaaccctaaccctccccacccctcccccccgccccctccccaactcattctcctccctctcccaccgcgagtcggcgagtggcggcggcggcggcggtagcgaccggcgatctcgcggccgaggcgaggcggcggcatacctgccctaccgcgggcaacgactggtggcgggggaggcgggcgactggggggagggggagaggcgggagaggaggggagggggca

SEQ ID NO: 51645 - DNA, 1284 bp, Oryza sativa
ttttccatcacatcgttttaattttaaccaaacttccgattttagcgtgaactaaacacaacctatattggtttgctggtagcgttctgcaggctgctccagtcaatcccagcaatgccaatccgcaacatcctctcccaaacgatcttctttgacctccgtagttctgtagtttagagcataattaatattgtcaactcagatgtgttgcattctaaagtccaaaacctgaaacatacctgaaaacttacttttctctgttgatcttttatatgtttggagctagtactcaatgtgtcaaaggttgataactttttattgtaaaactaggatcgtggtgagcgtcagggtccaagaataacatcccagttgtgcgacatcatgcccccattgaacactagggccagaagaaaaaagatccaagtattactgcaatatagtaatagttataatgggtaaatttgatccatgtcattgagaaattgtcgtattgaaaaaaatggcattactatttgtgaaatgtaccgaatgcccctgaaatatcctaaaatttgaaccgtgccattatcaccaagattttccaaacccattccatcatgatctcaccgaagcatctcgttgtcttcttcgtcaagcctaacgagcagcaggccagcagccggagcatttcgtcatggataaactcgtcagcgaggcgcgggtgggcggcctcgacggcaaggcagcagcgaccaaacaacacgtgcattttgaaagtgaacaaacaattacacagttatgtgtttcacaatattttttggcttgattaatatgtagcaaaaattttaaattattttgtttattatggaattaaaaaaatgtaatttcataatatgtagcatattaaaaaaaaactctctggtgccctcgcgtcgccctcgcgcggcggctcgggggcgaaaccctagccaccgccgcccctccccctccctcctccttgcttcgccgccgccggagctcgtcgccggcaattccgggcgacgcgctgggatggcggcggcggggccatctctcttggctccatctcgccctggcgcgggcgtggcgacaatggcggctgggcggcgaggtcgcggcggcgggacggtgatgtcgcggcgacggcgtggtggtggggctctctgcggcatcggcggcgcggcggtggggctccgcgcggctccggcgatggcgtcgccagttccggtcgccccgccagatctggccggggtgactacgcgcggccagtgacgggctcggtcgatg

SEQ ID NO: 51646 - DNA, 523 bp, Oryza sativa
ctgcagcgccatgcatatgtataatcgtgcgcttttcctgacataccgtgcagaccgctgcatctgctatttaaaacttgaatgtgtggctagtaagaaacttgaatgtggataaaattgccattgcgacatgtaaccattcatggagtgtatactgctttatatgtagctatgactcccttttgctacaactattgaattattgggaggataatagtttacagttatactgaaaaaggatggatcgatatattgtcaacactgtgtatatctaagtagggaagatatctagaaatagcctgacaatctatctatttatgggttatatcaccctttttctatagattaagcatatacagggaatgaatgctaccacatatggaataatgaaactattggccgaatatctaatggatccccgaggttatcagactataacagaatacaaaatgcatgatgaatcacgaacgatccgtcatggtactgcatggacagaacctacctatacaccaatactttccat

SEQ ID NO: 51647 - DNA, 610 bp, Oryza sativa
tgtttaccgggactagatttttgcccatgtatcctttcgtttcatggattaagacacaattattgcctcttgagaaaggggtcactgcttagcagtgttgctgccagttgaggtgtactacttcagttaagaagtaacttagttccccaaatttttttcttaaaaacattatatcgaatctttggatatatgcataaagcattaaatatagataaatggaaaaaactaattgcacagttaggaaggaaatcacgagacgaatcttttgagctctaattagtccatggattagccatagaggtgctacagtaacccacatgtgctaatgacgggttaattaggctcaaaagattcgtctcgctgtttccaggtgatttatgaaattagtttttttattcgtgtccaaaaaacccttccgacatccggtcaaacattcgatgtgacatccaaaaattttcttttcgtgaactaaacaaccccttacattcactttggagaaacaagtgacatctccaacttgtctgtactactgttaccttgactgatagggaatttctgtctagtagtaccagatgtaaactgatcctaattactctatacatttatgtgt

SEQ ID NO: 51648 - DNA, 955 bp, Oryza sativa
attcctgcagcagtttttgatgccccatgcatcctctgccttttaaaagaacaggtaaaaattcatatctggagtacttactgtaattgctgctgcaatctaatggctttccgggaaaaaatcgcattaagttaaatgctttggacatactcggtcttaatttttctctgcagtgcgtatagagcatttaacttctgcacaaactgacttgacaaatggtgaccactggtctgcctggccacttttaaatgcacttacattgcacggctttcacttaatatgtaggtgttttgttactgtttgttgatcagaagttcataacacaatcatggctttgcatactactagctatagggggtaaaccctttcaaaatgcactgggagggcacagttgctaccctgctgatctactctgtcatttatgtcttgttcacatcacccgtaggagccaggcggttcctggaactgcgaggtctcccttgcagaaacaaataagatccaagcaagatctttagctttgcaattggtttgttttgaatgaatggtagcgactctaggaactgcaatatttatggtgcaattttatgatcatacgttacccattttatggtcatttcatgatgcatcactgggctgctctgcaggatcagctgaatacagtggtgggggagcagaagagcattcaacaaaatctggaggacgttaagaagaagaaactaaagtatggtaagtctttgaaagctagtgccatgaaaaataaagataagacattgatgcaagacttatactgtatttaatggcatgtttagatccccttgcaaaaattttcaccctgtcacatcgaatgtttagacacatgcatggagtattaaatataaatgaaaaaaataactaattacatagattgcgtgtaaaattgcgagacgaatcttttaagcgtaattgcttcataatt

SEQ ID NO: 51649 - DNA, 501 bp, Oryza sativa
gcgagaggaggcttggagcctcatgagcgcttgcagcctctgcagagtcgtcgctgcttgcttcctcacaaggtagccacgtaccagagcttgtatcttgacaagcgccttgagagcgcgcaatgccctcctagcctgcatttgcggtggaaaattcaaatttttacagttgcttcgaaaagcaaatcaacagaaacaatatggaagtttttgaactatatgccatgacgactaggcttgtgtccccactgtgcagttacctaagcgtttgcagcaaatcatcactaaacaaaaatatcctaaaatgtggaatttatctatagtaggaagcagattaaacaatgtgcattgtgcaatggctagctactcaacggcaagaaactatcaaacaactgctgccattaacaacagttagtaaagtgaagtcaaatctcctgtccaatataaaaccaggagaatccataccacctactccctccgtcccattttgagtttttgctt

SEQ ID NO: 51650 - DNA, 709 bp, Oryza sativa
agcagtgacgcacgcccaccccacccgcgatggtagcagctcggctaaccccttccacactccacaccagcgcaacgacggaagtgtgtgacgcggatggatgtggtagtacgctgtagcatgtactccctccctccgttcttaaaaaaaagacaaaccatgttttcgtgtccaacgtaaattaaaaagacaagtcacgtataaaatattaatcatattttatcatctaacaacaataaaaatataaattataaaaaaatttcatataagagagacagttaaaattggcaaaaaaaacccagagtttgtctcttttttttttatggagggagcacgagcgctcactgatccggtcaaataaatgtttgtgcctttgtttatcgccttgtgtagggatacggattctaggcctctggaccacagtgggaacgtccgaacgtgaattggttaaggctgtgtttagttcacgctaaaattgaaagtttagtcgaaattgtaacgatgtaataaaaaatttaaaaatttatgtgtgcaggaaagttttgatgtgataaaaaagttaaaagttcaaagaaaaattttagatctaaacacggcctaaccatcgttggcatggaagttgaaccgctcgtatactgtatacttcgactctgtaatgtgtatagtgttataactcacggcaacaagcttgagaaaatggggctgcagg

SEQ ID NO: 51651 - DNA, 619 bp, Oryza sativa
tttgagggatcatgaatgggagacggtgatccaacttttaagcaacaatcaaaaacataccatgccccttattgaacaggcatggcagatggcatcactcttgatcggtttaattgtcggcccatcttgactggtgggctaatctatctataccttaatagttacacgctcgcgcatatatacatatatatacatatatacatatatacatacatatacatatacatatatatatgtatatacatatacatacatatacatatacatatatatatgtatatacatatacatacatatatatatatatacatatacatatatatatatacatatatacatatatatatatacatatatatgtatatatatatattgagggaatggttagttcatatctaataattggatggttacaaccaaatacttctacatagaatgccaaaaaaaaagtacttctacataataaaatttaaacgctagacatcctaaaatattttgaaacatagtgagtaatattaaaaacaaactggtaggaaatcattagctcactgaaacaagccatcgatcaaaacctcgcctcctagtcctacacccatggtctcttgatcgaggtgttcat

SEQ ID NO: 51652 - DNA, 612 bp, Oryza sativa
tgtgcaataaaagatatcttgttgattttgttttggagtgttttcttgttaattggatcacgccgcaccgcacttgtccgtgttggcctcccaaaaatccgttataaattatcttttatctttagaaaaatcactcacctcaaaagataatttataaccaaaagaccaaaaaccaatcgcacaattgtcaagccaaccaccccagatctacttacgacaaacacccaatccaggccgtccattcccaaacaagagcggatctgagccgtacaaatcctgagtgcggatccgcttatggcgcaaaggcgaagggtactcgaggctaccggttaaaacgcccaagtcagtggctctcgtcctcctttctcctacgcggccggagagaggaggggggaagagaggatctcgcagagcgccatagcctcggatccagaagcggaattcggtggaggtctcgggcacctggatcgatcggaggaagggaaggcggagcaacggtgatggggaaggccgcggcggtggggacggcggtggtggtggccgcggcggtcggggtggcggtggtgctggcgcggaggcggaggaggagggaccttgagctggtggagggag

SEQ ID NO: 51653 - DNA, 644 bp, Oryza sativa
tgttcacataaacctttagtacaaaacttccctatgttatgattgggcctattcagctgcaaggtgtagacactaaaacacagttttgttgccacggttgcttacacggagcattgtttccagacggctgtatcgcagccgaaccagcccattcatcctctttggtgcttttgtttgccttttctctctctgcccatggcgagttaacaagctccattcccttgttttccttcttagcactaaactccacaactactgtcatttcaattttccttcaatggtccaaacgatcatatgtgaaagcgtgtatggatagaagatgtgttgtaatattttgtggattaatgtatcgaaccttgagggagtacatggtttagatcttaaggagccctgatagattcaatgacaactaatcatatcctatcataacaattgaatccaatagagttatctatactctaacaaagctgctctaacaatatatcagggagaaagcaaaatgagagaagaagatgctatggactataaagcatggtttgtaaaacttgcgcggttatcatgattatcacgtacggtgatcttctcggttcttgaatccgcgataatctttgtggtaaccgtacggtttttcacgacaatcatat

SEQ ID NO: 51654 - DNA, 669 bp, Oryza sativa
actctggagtatctcatttcaaatcgtggcgtctctgttttattgagctatagcggtatactatagccttctttcccctgttcgcctacagtttttcaactttcaacaactcccgagttgatctttgcgtctcctattagttccattgtttcagcactggagtaatagttctagctgctgttcttgaatccttttatccacgctctctacacattttttttgacgcctctgttcgtggcattcgtcgtgctgcagataggttgattcaccatgggccgcgcgatgaggtggttcaagaaggttctcaccggcaagaaggaaggaggagacagggatcggaaggagcacagcgccgccggaggcgccaatggtggcgtcgcgccgccgccgatggagaggaggaggtggagcttcgctaagccgaggagcagtttcgctgacggcagccgcaggccctcggtcaccgccgtcgtcgccggcgagctctcgcaggtccggccatgcagctgcggccagcaacgggaggtggaggcggccgtcatgatccagaaggccttcagaggatacctggtacgtctcccaagtactggtttggtgacttgattttcccctgaaaatggagaagtttgttctgcagctgctgcatgtgtttgaactttgaacattagc

SEQ ID NO: 51655 - DNA, 1131 bp, Oryza sativa
cacagcgtttttcctgtttggctgttgatgttgtctgtcatttctggtagtgactctagaaccagatttagatgtagataatcctgtctcttaggataaaaggcacacctgaaagtacaaagggacttgtgcgtgtctcccgagatgcatgagggaattgcttaaccgttactagtagcatcttggaccgtctgaaatgtgcagtgaccatattgttttcattatccaagcacatgtcagcagctaaccactgaattctgttcaaactttttcgaactcgatacaatatgtcactcgtttgcagcatttggaggatcgctgcgcggaatttatttccatcagctattctcgaccgcggagctaggacagtgcgacaatgcacacatcgatttggactccattgaagaggacacgacctgcagctgtcaatcttgtttttgctgacggtgtgagtcggaacggatggacttgagatttgtttttatctgctgctgctactgctggtggatctagatcaacagtagatctgagttttgacagtttagtattggtccgaactctgattctgtgtaggagtagttatgatgcagaagcatacggtctacggtactgtagaagattgtttttgtcgcctcggtggctctccgtaacaggtcaaggcccgttatcagcacagattatgtatttcacgcttctaaaaagacattttcttttccccgcaaaaaaaaagacattttcttttaaaaaactttcttattacgttatttagataacctgttttaaactatatcagttaagacttataatataaaatactactgtttaattcaaatccatgataaagaaaatcatccgttagttttcatcaatcagcccctgaaaaatacgctgcctaatcttgatgttgtcagtggctcagttcaatgtaggacagtaggagtcgaatacctactacaactcgtagtaagtactacagtgcagtacttctaatcctagtggtatactatatgactagaaaatgccgtgccgcgtaattgaccagcttttatgaaataaatgaatgaaatgctctgataagtacacctaatatgttttacttcctccatttcacaacgtacttcctccgtttca

SEQ ID NO: 51656 - DNA, 579 bp, Oryza sativa
tagttcatggacaagcgtttacattttacaaccgttgcagggacgccagaaatcgtcctcgtgctcccggtacccgcgcgcaaacttccccgggcttggatggacgacgtcggagtaggagaagcacatcttgcagacgctcgccgcctccagatgcccgcacgggaactccccgaccaccttcttcttcagccatggatgcttcacgtggaggccgcggttgcaggtcctgcagacgcagtcccacctgccgctccggcggcgccgggtcgcccaccggcggcagagcgggactctcgccaggaggccgccgccgtccggctcgtcagccatcgggacgcacgtgacgacgccgaggaagtccttgctggacatgtgctcgaagaagaagagcgtccgcggccgggagggcaggaacaacgacgcgaggcagccggagcggcggcgagccacgaagttgccgtgcgtccaggtggtggagttgcatggcgcgctgcacagcgtcacgtcgcccggcgcgaggtcgtgctcgtcgcccgggtgcagggcgttgtagtgatccaggcactcccgcgcgag

SEQ ID NO: 51657 - DNA, 605 bp, Oryza sativa
tccaatgcattgttcttgcaaagggaatatagccttttttagctcacgaacatgtgagcacacagccacacaacacggaggatgcagatgtttagggaggagaaaaaggctacagattctttcgtaatccaccctgtcctttgttcttttcctgccattcggaatttagtggtgacccaatgacaaagacctttccagtgtttccaattccaaggctgcaagtattaccgtgaatctttctgtcagcaccataaaaatattacaccccttttttgggtcctgtagtttatcctttaacctaaagatcttgattttctacaggtggagcctatgatgattaaccatctggaattaatgcataccacataccagtctttcaatggtgaaattgagcaagggatctgctgcaaacttttgtggccatgtggggttttacctgaaatttcaggtattcctcaagcttttacctcttgcagacttcaactggtaatttaagttcactagtctccttccagtctcgtataatggtggtacaatttacatctggttcagtagaaagtagtaaatagaaacaaattatcaaaacaagcagggctgcaggaatt

SEQ ID NO: 51658 - DNA, 1761 bp, Oryza sativa
agatttaaattttggtgggtaaaaaccccaaccaaattacttcgatttgctttcgatgctccccatatcaccggtggtgctttccagttagtttggattttgataatagaaaattttaacctcattgaggcttgactttgaagcattgaaaagcgtggaactattcatagacatatttttgttctttgttctttgttcctactatagtctagcataatttgaacaacgcaagaagtactccagtaaacaatttctttgttttggaatcctcaaggagccaattgggtagaacatctttatcggaaccaatagtggtacgcgtttgaatccctgggacctgattaagctccaatattcatacgacgtgcgcggcagagtgcagagtccaaactcaaacgccgaatcctgtatcaattacaaggataccctttcccatcgtgcaggcgacctgagtttttttttctttttcttttacacatgagccctaccttaagccggcacgccggagagttgacgtcgtcaaacaggttttaatcgcactcccgccaaagtggccaaactggctacctccgattgattcggtccgtgaagccgcaagccggaatcgtgaaaggattttttttaaattactttttgtactttttaatttttttattttaaaaaataaacacttctgaaacttatttacaaaatctagacattttgtctatatagagaacagtgtgaccaaataacactgtcacaccgttcaaatcttgaaaataagtcttggaaatatttagttttaaaattaaaaaattaaaaagttcaaaaagataaaaaaagatctatgaaagccggcggcgaaatgctactccactttttcccatcgtgctggtgctcactgctcagcgagagcttgacaggaaatatttctgaattcccatcatggaatgaaccatattggttgtgtgaaagtaggaactactacttgcatatttcggccggttttaggtcccaactttttcttcaaaattctaacttttctatcacatcaaaactttcctacatacataaactttcaacttttttctttgaactttcaaatttaggctatgtttagttcagcgcaaagtttggattttagttgaaattggagatgatgtgactggaaagttgtgtgtgtatgacagattgatgtgatgaaaaatgactgaagtttggatccaaactttggatctaaacacagccttagtcaaactttcaattttaacgtggaactaaacacacccttaggttgtggttttcaaattttccgtcgtcagagtttgctccggtgtcagtaacactgtaacagagctgtaaaaggagccaaacacaaaatgtacatcttgagtggttgcaacttaaccgccaagattagaacatagctcatgcttttgcatataggagtacttatcttagtagtagttagctcagtcatgtccatcacatagatatcagatacacccctgtcattccagttagttcagtaatacctatcacactatcagggctatcagtcctgattaccttcataaacttttgtcggccgatcacactatctccagcatagcaatggtcaccgacacagccggacagtttcatctgtggttatagctgtatataaacccatcgcaatctggacaacagcatggacaaaataagggcaaagagagcaatctcatgatgatgtagtaatcttgatcggttttatttttgtcataaacaagcagacatgca

SEQ ID NO: 51659 - DNA, 689 bp, Oryza sativa
tgggagttcaggtacatcaggcttctggaagttctccttcagcttgtgttcgaaactgtcatatttgcttccattgagaaaaggataaacttaatataaaaacctgagaactatgccagttaggaaagttaagctactttcttgaagactgaagggagaaaaactaaggccatatagtttttatagggtaatgttagttagctttttatagattcttgacactctaaattagatttagtgataaaattattatcacatacatagtctttttgaaagatacaattgtgtgcagttaaaaacttaagatttcaaattaagtttacctacagcatatgctcaaaatatagaaaatctaatcatgttcattttcacccaacaaaccgaccttgcgatgtgtggctctccttctccaagcaatgtttttctaaacaaagttaggtggtttgttggaaaaaggcaggattattttttcctagacaaatgggtaattgcactaggcatacactttcctaaaaaggcaataaaattcaaacaccctgtaaaagtccatcagtgccagttccgtcaaatgacaacatggagatctcacaagaaactgagctgaggcttacctagaacagctgcctttcaattgctgcatgtgtgtgtcccatctggcgaagtctttcggatgcttctcactgtgtgat

SEQ ID NO: 51660 - DNA, 620 bp, Oryza sativa
atgcgaaatatctagttttgcggtttgaggataattttgtatctcgatgagaagttgagggaccttggttgtactttttccttcacatgacgagtactaagactggccctggacgataggaagtccagaatacatccttagtgtacacttgattatgggcctcgctatggattaggcatgcctggcctagcaggccactgaaaggaagcccaccgggctgacagtgcagtagttgggcttaaagcatttgtctgttaggctttttacggcatgcgagtacaacattgctcccgttttagcatttgaggttgcaagttatttgtcgttcaaccttaacccaaaagccaagactagcttattgtattttaggtcatgtttaaaattacatgatgaatttgatcattatagtggacttttaatcttcggcctgggtctatggcccaagtgacctgagactttgggtccatctctaagtcaatcgttaatatgtgtggagattatggttaccccatatctacatggcggttatattctagctggatatacggtaccaaatatagatagaatatctttatgaggactcgggttagattctaaacttgtatgtcaagaaaataccc

SEQ ID NO: 51661 - DNA, 588 bp, Oryza sativa
ccctgccagtgtcagcgagccgggattcctcacaggctcggcgacgctgccgtttggtccgccttcgccgccattatggccgtagcttaacctttagccttgattacactctgctcgcgagtgtggactactacgttgctgctgctgctgcctccggccattacacaccaaaagcgtgcggttcgtgcaggactagatttcgttctggcgagaacggagcgtgtaccactgcatgaggagtaaatttgtttacgtaccacggcgccagcaaagtactcgatcgctagctacacggtgaccacataattgctctcggcgagaggatctccgtgcaggcaagcgtggattcgaaaaaccgatcgacacggcgccagcacttgtacgagagtacgcggttgccacggagtgccgtccaaccaccagcgacaaaagttggcatctagggaatgactagcgctatactactgtatactactacggccactagcagtgcaatgcatacttttgaggaggcttcaagtaccacataatattaagctacaagtctcaaatgtatgggttaattagatccatgccattgtaaataaa

SEQ ID NO: 51662 - DNA, 590 bp, Oryza sativa
tcctgcagccccgacataatgtacctctaactaatacaggatatcgtaattgtgttcttttgtaggtgcaatgttagtttcttctgctgaaaatatgatgacaaaactgtatagatgcatatgttatttcctagctgcaagatcatgattagatgatgtcatgattgtgttcttttgtgggtgcgtgatataccttcttatgccatagatgattcgcaaggtgccgcagacttcttctgctccgtccgccggaatcgacttcttctgctccgtcgtcggaatcgacttcttccggaatcgactaatgtcgcatgctggcggggtgtatatatatgtatgcaagccttacgaatattgtctcatgtatatggaactaatccttcttgcaattaataatctttcctagtgatctaaattttgctttttgagatttggaatcttgccctgtgtacacgtacatatatttatggaaataatgtgcgggccctacgaggtgctgaattcctctcgttacgccacgtggcaacttgagagtgttttgagggagacacgtggcagcttgagagcgtttgtagggagtttaatggact

SEQ ID NO: 51663 - DNA, 712 bp, Oryza sativa
caactgtcgtcttctggttagtgatatcttgccccaaatgttcatctagaacattttacaggtgttgtcatacgctgtctcgtgttgtccattctcgtggagtagaaaattgtagtagtggacaattttcaacttcaatgtccaaagaaagaacatagttgagctgtcaattcttatttacctgtagaatctgatggatcataaacagaaaaagtatccttacactgctgaaatgcttgataagagttactaaaaaaacaagagcaaggcgacagtgctactgcctttttccagaacaaaattatcagtacatctgatatctcttagttatataatatctggacagaattattaaattcttctctaatatattttactaattaactatgttgtcatgagtcatgagtaatatctcgtgacaaacaaatgaacaattgtgcatagcaatactgctagtaatcagaaccctagacgttgtgcaattggcttgggtgacttgggaccatgtagttttgctaatgatgcagctatgctgttagtctttttgtatacgaaatatttatgctctgtatgcatggttatcattagggcctgttcactttgatgccatgggcaaccttaccaaattttggtaaagttaccaaaaaaagtggctacatttagtttcctgccaaattttaatactatataagaaattctccacaattttggt

SEQ ID NO: 51664 - DNA, 586 bp, Oryza sativa
aaccatagtgagcaacaataaaagcctcgacggaagcaattacgcaccatgccctccaccttgaaaaagacgtggttataaggcatgagtcgaatgtttcatctgccatgagatgagacactattcatggtactgccctcagaaagtcaagtcaaagcaagttcaaccaacaacaagccttcccaacgtatctggaccaaaaagttcaaagccaccaaacagtggttctgcctcgttgacctcaccgcctattggacaaagccttctgaaccatgtgcaagtagaaacaaagggaaaagttttgaatctcgagcaagttgaaagagcagatgaagaacagattccacatgcaagatcagagccacagtaaaagggagactgctaagtgagtcagagtaccagaccgttttgtggcaagtatgcagtctcgagataaagaaagacccgcagagtatgaagctaagaagaagtttgaagttccccttttggtttcatgtgtgtggtccaccgtcgaatctcggggtcgagattcttgtaaggggggtggatctgtaacgctccgcttttcgtgagacgttaaaaacta

SEQ ID NO: 51665 - DNA, 691 bp, Oryza sativa
taggttgacgtatttcaatcctagtagaaatgcacagtaccaccacccctagcaggtaaccaagtacgctgcgacccagtttctacttagagaaccctaggtcgcatcagagagggtaaaaaaatggcgaaacgagggaggggcgtcgcccgacctgaggaaggcgtcggcgccgtcgtcgccgccgttcgcctcctcggaggaggagccgtcgtcgttgaccatctccacgttgagctcctccatatcgagctgcaggatctcctccatctgccgccgctccctcgccgggaccccgtcccagtccgccatctcgccgccggtgccggtgccggtgcggtgcgccgcgggacggggagaattccaacgggaaggaaccggcccggtccctgaccgcgcaagcgagatttgggttggtttccccttccttcctttctgggccgggtcgaggcccagctttctgtagacgcttctcgtcttgtcgagtctcgacgacgcaaagcgaggcgtacttgacccacacagcccaatacataagagaaagtttaatagtacagttcactactacctccaattcatctataaccaaacctaatacctaattcataaaatagttacttactatactattaatatatggtctcacccatcatatccacattgcgtcttagagtccgtgctgcaactgagg

SEQ ID NO: 51666 - DNA, 1220 bp, Oryza sativa
aaatatgcagtacaagagggataacttgaacgtaaagcagagacaaatcgatacagagcaaagacatgggaacagagcaacaggacattagtgcagtacacattgacgatgcagggatgcacgatgcaatacctgaggacagcgcccgttgtacagcccaatcgcgagtgaagcggttggcgatgcagtagctcggcggcgcaaccagctcggcctcgcactccacaaccttgcgggagcgcacgtcagatcgagacctccgtccccgccacccacgtcgccgtccccccgtccacaccgcctgcagctctccgctagcgctctctgcccgcaacccacgccatccccgccgcccgtcgccgtccccgccatctacgccagcaacccacgccatccccgccgtctgtcgccgtccccgccgcctacgccgccaacccaagccatccctgccgcctgcgccgccgtcccccctgcccaaagctctccgctcgcacctccggcccgcgccatccgccctcctcgtccgcccttcccctcagacctcatcctttccattttcccctcttctgtcactctctccttgctatccatacgtatactcgtatagcggaatagaaaagaagagcaaaaaaaattagctagagttacagagtattagttgcctactactaattagtattttagtcaaagcaaagtgatgcaaaatttgtttggttaagtgcagttttttttcacaaatgcataattatttcatctacatagattaacaaaatttaacaatcatctgtgtttttcctgtacttgcgagacgaaacttttaaaactaattgcgccatgatctaacaatgccgtgctacagtaaccatttgctaatgacggattatttacgcttaataaatttgtctcacagtttatatgcggattatgtaatttgttttgttaataatctatgtgttaataattcagataaccacttttctctatcctctattttacacatgcttctaaaaaatcctacgctaccacatgatttaaaatcttagacctattattttggaccattacattatatcttttcaaaataaaaaacatatataaaatataagaaaaaaaatatgaccattgtaactttaatcggtaaaacaattatttacatccgatagaccaatccttaaaaatacaaatccattccacctccctcccgtacataatcactcatc

SEQ ID NO: 51667 - DNA, 2997 bp, Oryza sativa
cagcaccggcgcctggacgcacggcaacttcgtggctcgccgccgccggcggcaatggcgccgctgcctcgccttcgtcctccccgccacgcggacgctcttcttcttcgagcacatgtccggcgacgactacctcggcgtcatcacgtgcatcccgatgccggacgagccggtcggcggcttcctcgccagaatccctgtcatccgccggtgggcgacccctcgccggagcggcaggtgggactgcgtctgcaagacgtgccgccgcggcctccgcgtgacgcaccactggctgaagaggaaggtgatcggcgagttcccgtgcgggcacatggtggcggagagcgtctgcaagatgtgctaccactactccgacgtcgtccatccgagcccgggcaagttcgcgcgcgggtacctggagcacgaagacgaatttggccactacggccgtaatggcttgagggattatccatgttaactaaccccagcgtgtttctcttcgcttgcaatgctcacattagaagatctacactaataaatacgtatgtaacagatatttttgtcacttacaggtaggagtagaaatttgacatgttgcagcaaacaattcgtcatgcatgttagagctgcacaatttcagattttgctatatatatttcagaatttgatgcttgtgttggataatttcgtaggtgaaggcgtccagcacgctgtcatgatgcgataatgcttctctttggacaatttcgtatgagtgaaggcgtccagcatgctgtcatgatggtattatgaactgcactgtaatattattagtccaaaattctagaccccaggaaattggatattaatttcctattaccaaagtgctaaatgctgaatgtcctgcagagaaagctaataatcaggaaaaatccgccgtccgcccattacttgccttgctcaactgggcttgagcacatcctgatcaattctacgggcttctagaaaaactgtgaagcgaggcttaaaatctgaattttgattctaggactagaaggtgtttctttcagaacgatgaattcttgttagtgacctgtcctcatatcaacatctgaagccttgtgaaatcgaggagtagcatctagcagatagtgccgttctagaatcttgatggttacaatccctgtctggatctcgcgtgcggttttctcaaaagtcaaaaacacaagctgttactctctggaagcgaatcaatcatatagtcttcgggtacacttggaccatacagtagcttgcatctctgtccacaacctttttactcaaaactcaaaaaagtcgttgaagtttcagtacagaaggaactgacagagtagtgccgaactcttaacgaaaaaccaaattcgctacatctgcagcgcaatttttcctttgcggacagtgtgctaagcggtgaattctgcaacacaacgagtttcagagtctacaatgtcctagcctactacaccaaaactcagactaatcatggacttactgccagaatagttagtactaatgtttagcaatataaaacgcaacaatgtgctggtaggtagtaggagttgtacagacagtgggcatcagagtgacatcctttatgtgtttttctgaagctagtctacgcacaagtccacagtcagcaaaggcgagccgggctctttgaaattttcttcagtttctgacgttgcacatgagacttcctgctcctttccttcgtggccactctcactcatcgctagccactggatcaccgaacgtgcggctgagatcgaagctgggatctctctgtgggagacgggtcaatgggctgcacagctgcatcatccagaagcatttcctgtcgctgccagcattgtcatcgagcacctatacggtgtgcattttcaggttaaaaaaaaaaacggagtatccaaagctatactcggtattctagaagtgaagaaaccggataaacttttcactgtggtatttatccatatataccgactatatactgtatgcacgtgtggtattgagtgcagtatcttatgctccctttcacttaccgtttcaggcctacgactagtcaacgaatgaccacaaagagtttaaagacaacccagaggcgccagagccacatcattatctaagacttttctgtttgactcaactttagaccagggatttgtgcacgagtacatctagatgtgacactgacatcgtgggcccaactcaccctgaacccgtgacctcgtgctgacgactcacattcccggcctcaggtggatgatccccctgtaaaatcagtggaaacaaaaagcttatcatcatttgctaattgcttccactttaaatttacttgccgtgcttgaccggttataatctcgactctcgtaatagttttctttttctttgaagactaataaatagtgtgatactagttctaatcggtttgaagatatactaaaagaaatggtttcaacagcgacaatacggccagtggagcaaaattagatgtttaaattattggtggccatgggtgatagcaataagatcgcgcgatctgcaacatcttccactcctctttgtcgcaagtgatcgacacctctgtgcttccgaatagtttgaccattcatccgacggcagagtaatgtgccggcacatgctacagtccaagccaacggagcatattgtcgtaccttgatcatgaaaagatcgcaaaactcccataaagaaaccatgtcacgagctgtgcaattcgtacacgttgctcagcttagtccttaacttaacttagtagtagctgcataaacaaaccatctagaacatatccctttcaaacaacgccaccatctgaccagcaaaaaccaaacaaaagatgagctaaaccaccaactggtgaactagtatcaaattataaaggaaagcatggctgaaacttccaagcaagcagcacccaaaaactaatcctaaattcctaacaaattcaatcatttaaccaaa

SEQ ID NO: 51668 - DNA, 857 bp, Oryza sativa
ctgcagccccgaatgccatttttcttgttgcaacaacaatctgactaagacagaagctgtagccttaaaagaaaattttcaacaacatgtctacaccttttgagcggcagaaattgtgtgctttgttggccaagagtgacagccatggcggccaaccgtgaagctacgcagaaataggagcaaggaaacagaggaagaagaaaggaactggggggacgattttggatcgtcggatgataacgaacggtggatagagcagaactgcacgcctgtgactttgcaacccaaagtcagaggatccgcttccccagatgagccacgcccatgcgcacgcggcggagacgcaacggccaacggctcgtgcaacggcggatgctcgcggttttggggcggtgaaactcagggaaacccgctgagccgtagtacaaattcgacacgcaccggtgtcgtacaaatccgagagacacgatggtttccgcgcaagatgcacttccgcacgggcgcgctgccgaggatctcaattctaaaccgtatccagatgaattttactctgcttgttaccctatctatgtctgactaggttggatatacttatccatataaaggcgaaatgctatacgtatgacttgagcatctgacttctggacgactgcgtagtacacaacgtcagtaacaaatagaatatcttacaaagcctcacaccgtcacgcatcgcattgttcttataaaaggtaagtggaacccgttcaatattagatttgaagtcaatatccccaagccaataattcatcataactaaagtttaagttgcttttagaaaatttaggagtaactagcgacattattgactttcacat

SEQ ID NO: 51669 - DNA, 597 bp, Oryza sativa
  unsure (1)..(597): unsure at all n locations
acaaaagctaaagtgacttaaaatatggaaccgaaggaataatagcgagtaggaagacaaggaaattaatttgtgcagttcaagtcagaacgtagcaggcggagacgatggtttttacaggtgcaggtccagagagctcctggagattttattcaggtagtgcgccgggtaagggcacctgcttgcccccttgcaagttgtcaccgggagattttcggtcgcgtgtggcgacatggtctggcagcgaagattgcaaggaacccagattataatgactaaaaatctaccctattagctccgcctgcgtcgctcgccctaggcgacacgggcagcgacaacacgcgccgacagcccgcttcctccccctctcttccgccttgccgccgcccgagcagctgccggcaaagccacgcagcagcaaggatggtggcggcggggcctcttttcttctctcaaggagtacggcggggcaccggtgggacttgagcgactgaggcggcggcgcggtgccgccagatccgcgccgctccggccggatctggcgggatggcggctggcggcggngaaggtgatggcggcgggggtgatgatggcgtc

SEQ ID NO: 51670 - DNA, 777 bp, Oryza sativa
ggcaaaaccccataccaacattcttattgccaactacaaaaggattgtagtctttgcagcgatcactagacaaattggaccattcctggtacagctgatggtctctgttctagtagatcatgcggtaacctgtacacgggttgaacagatagtctttcatctcaatgctcaccagattcaacccatggcaaggcttggagcaaaccacctttttgtccagaaacattgtgcctagatttgcctcttggagccatttactcaagggaataaagttgaaaactgatttttcagagcccttacccacaagcatgatctttggcctcctgtccatgttcttatgctcaaagtatgcatgaacaaaaccttcattctttatcaatccacgccattgcttacaaacaagttccaatttcaagattgattcagctggtaatcggagtaggatctccttagtagccttagacaagggagtagagaaccctatctctttcctcgtcctatgcactggggtaaaactctttgtaaatgaactgaatctaatatcagatttctcgttttgataggcactgcaggtcaccatgattgagacaatggtttcaagagttctagaaactggatcataggcacacaccttgtgcttagatgtagcgatgattatcttcttgcttgatctgtagctaccaaaggaaccaataactttcacaattcgtggctcaagtaaatctcttggcaaattccctgtcaaaccaattcggtaatcaagcgaccaatcaccag

SEQ ID NO: 51671 - DNA, 1147 bp, Oryza sativa
tccgcagtagcaggattgttggggaactacttggatcgaaacgaacgcacagaacaaaaatcaatggtgcgaggaaattagagcggaagggttttaataccgtgctggcggaagctagggttagtggcggcggcttgggaatttctccgtcctcgacttatctctctctctctctctcttttttttattcgtcctcgactaatctcttcttgggcccttgctccgatccgcatcggaccgtgcaaagagggccacgttgtgttcgtttccgttctttttttttttttttgtattttggctctctgatctccctctcccggggtcccgccgctcgtccggcgaagccgacagccgcctcgccgtcgcggcctcgccatgagcctcttccccaccggagtcgccgcatctcctcgctgctctctcttccgctggaagcgcaagctccctaatcgtatttttccatggcctattggctctaccattccaccagagtgtagagttggggagcgcgaaagcagtgagatccgtcggcgatgagtgctcaccgcgggtgatgcagtcttccgccgccgccgtcgagatgcgccggaacccggaaggtaaccaccacaacacacccaagtccccacccctgtaccctgtttaggccttgtttagttccaaactttttctttaaacttccaacttttctatcacatcgaaactttcctacacacataaacttttaacttttccatcgcatcgttccaatttcaaccaaacttccaattttggcgtgaactagttttgcatctgtcgcgctggtgcagttggctagtgattagccaagcgaactgttcagatattgttttggagtttacgatgtcatgtgattatatccgcgtccacgctgattttgtcttcaatcgaacggaaatcggctgctaggagactcttatccattgatcggtacctgccaaaactctcacttgtgtggttgtgttgtgcaggcatcattgcacctttgtccccaatttggatgccactaggaaagaatggattggctgccaccacatcagacaaggaatcaaaacatcgaaaaggaggtagcgtatcctcagcttgggacccgtttagttcgcgaaaagaaaatttttgggtgtcacat

SEQ ID NO: 51672 - DNA, 693 bp, Oryza sativa
aattttaatagagcaagcatgatacaatgacatgactcaaaaaaaaaaagtaagctacatctcatagaagagttttatggattcagaccgacagcaaccatgaaaataagttccttgaacagaatggaatgaaagcccataaaccgcatcttgcaaatctgaacttctaatctgaaacgcgtccagtgcagagcaatcctttttcacttaataaagtgcgtttaaatatgtaactcataactatatgtaacaaaaactattttcacccttttcaaatcaaggttattggcaataaatactgcatacttttttttgagagacataatggtaattatttaaaagaaatatcatgattcctagctgcaagatatgcattgtagaatgaattgtagaatgaattgcacaaaccttgcagcagagccagccgccgtcgttttcacatatgtggagcctacacctcatggagcctttgcggagcacaaatttacatggccttcggcggcgcggcagttgctgccacattgggttcacatggccgtggccagtgcctagtgccccagccaccgctgccgccgtgttgatcccagatcgtcggtcctcgtccgccctgccctgccaccacattaggcccgcacgaccatcgccgacatcgctgccgccgcttggccgcagccctcgcgccgcgctccacat

SEQ ID NO: 51673 - DNA, 608 bp, Oryza sativa
ataattaaaagaacacactgttccactgatggaaagcatatcattacttaaccaataaacaatggtttgagccacaatgagtactagccacagaaagtaactacgtggttgattaaaagacaaccttttggcaatttaaattgactaaggtttctcctttgagtggcaaaattgacgattaaaccatcattctaagtatcaaaagccaaaataaatatcacaaaatgctcacgacaatttattcagaaagccatgaccaacaagtggaacaatttgaaagatcttagctcattttagaattaaaaagaaaagaaaagaagggaccctaggaaagctgaattcataggaaagcatgaactaacattaaaaatatgtaatctgtcaaagttacccatgctgtcaccatgcatgatgacaagaaaaaaacaagtatggcttccatggtagaaaagaggataaaaggcagtaagtgtattgttacctcccctgggggtgctgctgtgcgctgcagctgagcatggtggtgagggacagcatcctttcttcctctcacctgccatattttcatctcctaacgttagctccttcccacattcttctgtgtcccg

SEQ ID NO: 51674 - DNA, 1553 bp, Oryza sativa
agttgtaatatcactgaactgaaactttcatatgacaaaaatggccattaatttgtatagatcagctgctgctgcagttacagtgcatctatatgtcatggtgctgtttggctggtgctttaatcagtttgttacatgctgaataaaatgtcatgatctttgtacatgctgtcaaagttgcaaattttagctacatgctgccaaaaaatttcatgatctgtgactctgtgtatgtgctgccatgatgaaattcctaagctgctggatttccaatttctttgttcccctactcaatttagaagaagtaagagttgtggtcaaagtgaaggagcgttctcagaataaatgtgctctactcttttttttttaatcaattagtttctctggttttgttttattcaattccaatattatggcatggcattgatagctcaggaacaacatcaatattcgactgaaactaactacaatatacttgctaaagtgcatatctgcagctaaaacaagcaaaaaagttttggatcttaacgaacaatcatgtaaatagcttatataactgctaaattttattcacataatgctaactaaatttaagttccaaatgccttgctatgttttctttttctttctttcttttttctattgcagattagtgtagcggcttcctgaccaaaggtgtaaagcatcactgctatcaaagtcatttgactgatatctgattgacgtcctcaacggttgacacatactcatcggtcaagtcctcaacgtacatggagttgaataagtttgttgcaatccattagcaaacaccaaatgcagagttagttttttggtggtacaagatggttatgcacatgagcaagagaggcagagagcaagtgaaggggcgcaagcaacgatgtatcacacaactcacactcactggtgctttgtccagcaccaaacctcagcaccagatttttgtgccaataatcacatcagcttgggagatgtcttcctgatgcggtgggcaaaggtatcgagggccatggaaccggttgatagcccgaggagcaagagggatttacaggaggtggaggacagggaacgcatcgcagacttgttctgtacatgtttattagatcattgtgacagagtgacatgttgcactatcaagtaccaatagttggttgggattggaatgatcaaaatgagttgttcatgttttagaaggctgtgtgtttctccattttagtttagatttgagaaggttctaggtttttcctttaaccttttcactctgtttctcgcccaacataactcagtttttctccttttcactctgtttaatttatcaatttctaaatagtgccacacggtccaatctccggtaaaactgtcagcttgagaaaagtgatgtggaggaaccatgaactcaatgtcttgctgcattgaactaatatgaataaaagggtaaagtttaaataatttcaggttttaaatagatactccctccgtttcacaatgtaagactttctagcattgtccacatacatatagatgttaatgaatct

SEQ ID NO: 51675 - DNA, 882 bp, Oryza sativa
tacgagttcgcgctttctccgcgcggcaatttcgcgtgcatggtgctttgtattctcgactccgagctccgaggccccacggtgttttgcattctctttcgttttcgtatctgtgacttattcagttcgtctcgagtctcgacgtctcatctcctccgagtaccaggctgccagccggctcatccaatttaatattttcattcatcgagcgaatagcaacttagcaagcaaccaacaagcaaggcactaggctgatcatgcaaaacaagagttaaaaaaatgtactattcttgatatatcgcatttgctctgcagtatatacattattttagggggcaatttcgtttttgcccccactttcatctctaaattgagtttgcccctactttttagagttttcatttttgcccccacttttttgaactgaaagatgcttttgcccctgttttggatggaggagttaacggtgttaaatatgacatttatgccctctcccaaatctattcattaattgtgtttttgcccctattatgcaatggctttgaatttttttttgtgaatatgtttaaaactaaatgacatatttggacattacaatttggacaaaatttgaatttgaagaaattttggcaaaatttcggcatcattttaacaaaaattgaacaaaatttcaacaacattttacacaatcatatgaagtcaaattgtacctcacaagtatcacaaagcatgacaacataataaccaacaccaatatagcaaagtttagttcataacaagcaccaacatagccaagttcacatcataaccaacataatatcacacattacaggttcaaatcatagccaacatagtaagaagtaattgtccagatcatgcatt

SEQ ID NO: 51676 - DNA, 1059 bp, Oryza sativa
tgttttgagctattccaaatagatctgagaatagattactttgtaccacacaaatacacgagaacacgaccacaaaactgtagatctggagaagacaattgggtgttgtacatcagttcatttactacagtacagtttctaagatgctagccagtaacaccaaccatctgctatggtgttttaactttcgtgatctatgtgtgtgccatatttttgacagtgtgctgcaattttgtaagaaacttccagtttccctcacgtattactctgaatttatccttgaaggagggatgtctacaatttcctcttggatatctgatgacaaatgaatgtgctgtcctattgatttttattgttgctaaatggctggcagagattgctgttgacaaatccaatattgacagtagtgattgacctgagtaaacagcccaaattagtgtcttttagaaattattgataacatggattctttcatttttctttctttacgagcttctaaaccatcataaggtaggcttgagagcagcaccaatcaataggttatacatggttcatggattttcagccacagcctattttgttgatcgttcaaatagttagtttttcgggggtgcttctggtgttatgtaagactgtaatgcctaacagaactcactatttggttcctgcctgctctgtggtcaaagattctgctttatctggttcagacattaaagttgaaacaaagaaattgctacatgttaacagcttcctttttcatctgtttcaactttcaagtttgttttaatttcttcttttgtaaatcatcgaattggtgtatgtgcgtcccttgggtgtcaggatggttggatgtattagaccttgaaaagtagtttacttattctttacgttattaggtgttcttttataatcttatgtgcgcccttatggcaagagtttctgggcctggctatcaacctatgcttctgcatctgctggacttgaaatgctccagttgaagcagttcttgaagaacacaaaggtgaagaggatgttccgatgcttcttctagcagtgtac

SEQ ID NO: 51677 - DNA, 1052 bp, Oryza sativa
aaagtcacaggaaaacttcaccataacaaagcggacatggcccagtgctaaaaactgctaaccaaattctccctaaatttcgaagaataagtgcatgaatcgacgacgattgttaaaatgaacttgtaatcgctgtgaacttgggcaccaatgtacacattgcagctggcatcgacgtcacaatattgtgcatccacatccgatccgctcgggtggtcgtgctttcggcggctgcttcactgaagaaagaagatagcggattgtaagtatctaactatagagtagttttattcggaacatatggaatagaagtaaagatacaatgcattctactaatgtaagaccattgtctgtagtgtacaatatgaatatcacgaagttgtttttctgaaaacaatgaacatgcactctgaattctcagaataatacccgttcactagatgaaatgcctcacagtaacagtactgatctctaacaagaagagggatttctcaaagggcttatcaaaagataagttatgcatattccaaatacttcatcctactacactagacagattaaatcatatcactgatgagtgatgaactaccaggaactcatcatgacgtcataatttgattacggagaacactccaagtttagtcaaattcgactctgccttccctatcaacctagaacatacccgctcaggactgactgcacttttgttcgagagtttgacccagcagcttgtgatgatcaacaaaggcatttaagtcttttttttttttaacaaaactatgcatcactacatcaagtaacatcatttaagtgcaatgataaaagctaatagtctccaatcacatgtggtctccttgattttgagggggggaaaagcactgcaagtttagtaaaatccaaaagttgctaatagcccccaacaatcaaccaacgtgtgccgtataagagaaagtgtacacatacagcatacaaataaactcccctattgctttaggagtgcgacagtaagaactacgaatgtcaggataagaaaaggaagggcacacagtaat

SEQ ID NO: 51678 - DNA, 683 bp, Oryza sativa
tagatgtaggttagacttcccgttcgagaaactctaccttctacctgccctcaattatgcacgattaatgaatgccacctgggtggaagcgagaggtggaaatggaaggtcttagttcggaggtgggatctctacctgatagttgcattgccattcatgatgatcccctggcattcgtccattcagccattcaccattcacccattcaactggaattttggttgaatgccggaattgtgtccacaaattgtggatggatagttggttggctggctggatggctggctggatggctggctggatggatggtgaatggctggcggcggttcggttgctttgaagcatttgttgctatctaaattccatttaaggtcgtaccttatcgcccagcatcatcttattctctatttgtattccctccatctttcagatacggatgtagccttggatgtgcccgtgcccaatgaagaggaagagcgcaacatgaaacgtaagtacaaaagtaccggacacccacccagatcccaatagaatccgccaaatcctgcgggaaattgtaatcccattcaccagctcctacatttaattaacaagagaactattgtatttatctaacacctggattatctccacctttcatttgatccctatttatagattacgctgcgttgctaacgggccgc

SEQ ID NO: 51679 - DNA, 1520 bp, Oryza sativa
gggtgggggtgggaacggctaaagtgtgtgatgtggtccactcgccagtagagagaggagggaggtggggcaacggctaaagtgtgtggtccacttgccagtagagagaggagaaggaggggcaaatgttaaagtgtgtgcgatgtgtctttacatggtccacttgccagtatagagagagagcacacgcgcaataggtaaggtgtagtgtgtttttagctagactacttgttagagagcaacgggtaaagcatgtgcagtgtgtctctactggaccacttcctagtagagaaaaggggcaacgggcaaaagggtgtgcggtgcggctctatcggaccactcactagtagagagagggcgcaacgggcaaaaggtgtgcggtgcgcctttactggtccactttctagtggagttaccataggaccagtgacaaaaccgaaaatcagggactaaaggggatgccacgaggttggtgtgttggataaacccatccatgtctggaccgacattagagtggacacgtggttgaggtggttggcggcatgttaaggtggtcggatgaaagaacaaaggatgagaattaacataccatgattctcatagcgacaactaactagctttgcacctatggagtggtagcttcgtcttgatcagtcatctcctagtatgatatgatcgaaatcttggagattcggttagatggcaagcgccatagtgatacacaattggcttcgcggtgtcggccgtcggagggacgcacgttgtgtgccaagcaatgaggcatctcgtgtacatgtgttgcgtctttgctggtccacttgccagtacacacagacagagcatgcgcaacgggtaacgggtgcggtgcgtttttactggaccgtttgctagagagcaacgggtaaaggatgtgcgttgcgtctctaccggaccacttgccaatacacacacacagagagagagagagtacacgcaatgggtaaggggtgcggtgcatttttaccggaacacttgctagagagcaacgagtaaagtgtgtgtgttgtgtctctactggtccacttgccagtacagagagagagagcacgcgcaatggataaggggtgtggtgtgtttttactggaccacttgctagagagcaacgggtaaaggatgtgcggtgcgtctctactggaccacttgccaatatacacacacatagagagagagcacacgcaatgggtaagagatgtggtgtgtttttactggaccacttgctagagagcaacgagcaaagaatgtgtggtgcgtctctactagaccacttgctagtagagaaaagggacaatgggcaaaaaggtgtgcggtgcgtctctactagaccacttactagtagagagagggcgcaacgggcaaaaggtgtgtggtgcacctttactggtccactttctagtggagttaccataggaccagcgacaaagccgaaaatcagggactaaagggggatgccacgaggttggtgtgttggataaacccatcca

SEQ ID NO: 51680 - DNA, 1068 bp, Oryza sativa
ccacttacacctctgcctcttgttgccaccaattacttatttcttgtgtaatatatttcgagcaaacataggtcaatttgcataaaagcaatacagtgcttgtctagttaccagacaatcacaatcggcgaaagtgtagctacacatgacactttctatgtgcccacatgtttattgtggtccagagtacaatgagatgcctaaatgcactccacatttacagctaaaagcttaactcggttatacttgatgaaatgaacaacatggccatcctaaagcagattcaccaaagcactggctggcctaatattcagttgtttagaactcaatctggaccactaaactcagtatgcctaaatgccaaggacgccacaagatccatattatctacagaagaagtcattccaacacatgtttcatacaagatccaaaatgatttcatggcactaacaattgcaatcctattccatcacatagctatagtgggtacatagaaaataacttctgcttgcctctttaagcagtgaaaccaaggggaaaatcccaagcagaagagcatagcaactgacaagaacttcataggtaaatgctgccatgtttgctaatacgggtaaggacacgtctaaaagaatcaatcaatactttctttctttgtccaggtattccaaaattgcaatagcaattatctcagaaaagaaatatcgcattcgcaagcaagaaaactgcacctacccagcgccaagaacaagaacagaagaaccacgcaatccacggaacaacctgatcggaaattagtagcttatcgcaacaccaagagcaagaacaaactcccaaaatcctaaccccaacatcaacctacgcccaacaaaatagcgacaagacaccgcgctttaaagcttctgcttatcacaggattcacagcacgaaatgctactactactcagcgcaagaacagaataatcacgcaatccgcagaacaacccgatgagaaattggaaaacctatcacccaccacgcctagcgcaagaataaactcccgaaatcctaaccccaacatcaacctacgcc

SEQ ID NO: 51681 - DNA, 525 bp, Oryza sativa
tagtacctgtccagcattgatgatagtcacatcattaactgttcttggagctatttctttacctgccaacaaatgtaacaagaaaaaaatgttaaagacaatgaacaaaatataccacataacgcttctgaaagacaaacagttgaaggcaatattcagagaaaatgatgcagatgcagcacttgcagaaacaataatagcagattccatggaaaagtaagaggagaaactccaaaaactaattcggtgcatctaattcaaggataactctaccattgaagcatgctcctttgttgggaggtgttatttactgacttatccaggagcaggaagcatgctcagaaaaaaaaaatctactacctcaaaacctccatcccaaaatataatagcttttggtgaatctagatagacaattgtccagattcatagctagaaatgcttatattttgggatggacagagtacctgtatattctactgatcctgtcaaatgatgtatcactgtagcagatgagaactggagcta

SEQ ID NO: 51682 - DNA, 759 bp, Oryza sativa
attgctagattacggtcataatggctagcgaaagtacgtacgtacgtgtgccaaacctgcctgcctgcctatatatctgaacagagtttcaacaaaagtactcctccaaatgatgcactacggacgtagtattattctatagcagtacagaactttacatgtgttggaaaaaaatctaaacaagataataatatttacttgttccgtaacatttcgatcaaaactcaagagctgctagttgttattatgggcggcacaaaagcgaaaatgagctggttgtgggctccaatgtggttgacgatgatatataccagcccatgggcttacttttgggccttcttatttggagtgtacaagaacaatttaggcccttattagttctcaaaagtttaggcttaattagttcacctgcgtttttctcttctatcttcgtcttagctgtgaagtaaagtagtaaaccatatatgaaatggattatatactgccaggaaaaaaaaacacgtgaaggataataattatgtctctctgaaattaagtactccagttcctctcgcatgtgcagtttgcttcagatgcatgcctgcctgacacttgttcaggcttgcttctagatgatactccggaagaggagtttgatcactcgaggggatatcctctcgttgtttgcatatcactcaaatgattataaaaaaatttgaaaaaatttaagaagatgtattaatatgtgatatatcactccacaacatgcaagtaaaaatt

SEQ ID NO: 51683 - DNA, 2470 bp, Oryza sativa
ggtggacaagaatgaccagtctgacattggtcgcgtcagcaacgggcaaccacgatcccacgttgcgcccgtctccgccgggagtggaggtaggtgtgggctgtcccatcgaagtgtcattcggacagcgaccataccaatctccgtccataaagagaggaaaagtccagtttggaaagaagagggtgcatgtggtatccccttgaagtataaaagaaggaccttgcccatagagaagggggattgattctttccagatttagagcttagaacggggaagaagttggctcacactttggagctcattcatacccaaatccacaaaaacacaggagtagggtattacgcttcgcagcggcccgaacctgtatacatcaccgtgtctcgtgtgtcttgcgggcagacgatctttccagatacagaggagagcgagagcttgagatttcaccctaagcccccggccgaactggcaaaggggggcctgcgcggtctcccggtgaggagccacgagctccgtcatgggtctttagccactaaataatctggaaaaagctcttctagaggagattattagattatagtaatctggcttatagattataataatatagcataataatctacttatttgtttcagcttactcctaataatccagattataataatcctaagctgaatcaaacagagcctatatttactttagcaaaaaactcgatgcatgcaccatccccactatttactagccaatagcaaatcaagatattgcatatgggttataagagcaggtacaatagcaggctataagccagctataaacatattttaaagagattaataaagagagagaagagcagaagggtactgatctgtagccagctacaacacggacttcaatacgtaatgtgtgtatgacaggtgggaccaggtattaatagtatagtaagcaactattgtatgaatcggttattacattggctatagatgaataggagctagtagtgggctgcactattgaccttgctctaaatacttgtgtgcatggatgcatgcatcaatgtccatttactccaatgcacaaataacgaatagacttaatgaatgaacacaaatatgtagatcatttagaaataatttgaaaaaaactatatgtagatcaatttggaatggagggagtatatagatcaatttgaaatggagggagtaccacatactctaccaaattgttttcttcagacaaacatggcatcaaacatggaaaataagacggtgactttctttcaccgtgtaccaactttccaattaattctcagcacaagctgtttcacactaaatctcctgaatgaatgctggctgttttgaagatgccatgtggtaatcacaatgaggaaagcagctaaacacaccacacactgaaatagcactatttcagcaaatgtagcacatgcatctacacctactagaaaaagactgagcaaactgttactatctttcggcagtcaccagcaacactatgaggttgcagctcaagcggtcaacaaccagagtagctcaatgccaggaataaaacaactggaaaatgcctaaattgttggagctaacaaagtaacaacaaaatcaaaccacagaagacagcaggttatatggaccatttatgaaacaagacagcaagtaggtttaatactagatatgaagatactacttcgtagtagaaaggaacagagcatccaaaaggaagtcagagtcattaggcatcatgattcatgaacagacaatctcttgttcccagtgaagatagctagaaaatataaggatgaaaagagatacagttggacaagacaacactatccatttgaagaattgacgaagcatgatagtgaagcacaaaaatttctgaacattgaccatcaataggctgtaagtaaattacattagtagaatacaaacactgaaatgactagagttgaaaagcaaccacattggttgctacaaacaatcgaagctctaactatcccaattcccaaatgctcattcaagtaacaaattctcttgctcatcattgaataggcaaaccaaagatatatgatatttgaattgtaatgttacattgttacctgaacaatctgctatatgtacaaattaagcagcaattttgctatgcctacaaacaataatactcatcatatctttcttgatattatctactacttacacaaaatcatcaagcaaaaggtagcaaaaagatgcaggtgatgatcaatttccaaatcataccaccattatcatctagtagcaatggcatcggggtggccatcttccgatctccagctcgtgatctggctcctcaggctgcgggtgaagacagaggaggaggatctcctcccacccgtgaggaataatctcctgaatctgcagttgcatcatgatgcctaaagcatgcaaacatgttgcgaaacaagcgtgggatgatgc

SEQ ID NO: 51684 - DNA, 1202 bp, Oryza sativa
agtccgggccgaagatctcggcgcggaggaagcgggagtagggggcgtcgtcggtggtggagaagggggaggcgcggtcgcggtcgaggagggcgaagttgtggaggcgggaggaggagcggcaggggataagcggtcgctgtacgtggtcttggaaggggatggcgtcttggggacgtcgaggaggaggcgggccggggaggcgacggcgggatcgaggcggagcccccccgccatcgccggcggcacgttgaggcgcggcggcgccggcttgggggacgcgtccgtcgccatcgagagagactagggatctctttcttgctcgtctgctgccccgccacccaccgccgccggcacgtcgaggctggatgcgccgccgacgacgacaacgacgacgaggaggaggaagaggagcggagatgaggttgcaacggtcactttggttggagtgggcaagtcgcctactttttctagcacgagctgtctccctctgactgtgggccccccacccgagtagccgttgtactctctctgccatgcgggccggcccattagcatttccttcctcgctttctttctttaaaggcccgtggaaaaaccaagcccatggattcgcatttgttttgggccggccagatcttacgtgtatgatgtgttgggccaacatgatactaggcccaaacatatagtacttttcttttctttcagatgctactattatattaccaccgagaagaggaaatgtgaacaagaaagaatgtgatagaggcattggatgagcaatgtgatttttttattagccgcagaaaatattgacagtccgggcgatttaactcgtgcaatatctcatcaatatatgattgatacaaatatagagattatattaattattattgcatcgccaatatttaagccagccggccggcgagagcatcttatagctagatttccatatgacatagcataggatggatctacatatactacttctatatactatactctgatgaagatacatacatatagtagtagatacaacgtgtacctttcgatacgatgcatggtggatcagctggaaattaacaaaagcaacaactatagtagtaatacgtgctgcactagctacgtacgtacagtacgcatacatacctatatatatcttgtaagtactagatcgactagctagctagctagagaatact

SEQ ID NO: 51685 - DNA, 1167 bp, Oryza sativa
cgggctacaaagaaactaaaggaaagatgtatgttgtaatacgctggatatcttatatatatatcaactgaaaacaaaaagaattgggccacattagctgcagaaggactcaaggaagtttctgtgtcatatggaagtgaaggtaaagaggagcctaagaaagcattccccatgggacgatatatgttagacaaggaacgagaaatgacttcatgtatagataaaggttagaacgtttgaatttggtatattgtatttttgtatatgtcattgaaatatataaagaactaaataaattgtttctatatgggccttgaactagagacaaactcaaagaagtccaggtattagagaacattagcgtattgtatatttgtaaaagttgttaacataaaaagaaaaaatataaaaatattttctgtattgcctatgaattgtagaggacctcagagaagtctcagtgtcatatgactcaaacgtgaaactaagcaatttgttcccaacaggtatgcacatcagaaatatatactaacaagcggaggttacattagaacttgtggatgttcatgttacatgtagtgtatatatgttgcatacatgtatatttggaattataaaatgggggcatatgagttgcagcgggactaaaggaagtctccatgacatatggaagtgatggtgaagaggagccaaggaaaacattctctcaagtagggtatatgttagataaggaacgcaagaagtcttcagatgtagatgaaggtacaatatttgagagtgcattatgtgttctgtgttttctctatgttgttgacatatttggaaaaactacataaattatttctacatggaccatgaactgtaggggaactcggaatagtctgggtgtcatatggcccaaaagtgaaactacacaattagttccccacagaacataagaaataaatatacataaacgaagatgatattatttggaactaaaggagattagtgtaatgtattgcatgtctcatataaatgtctattgaaaataaaaacaaatgagccttacgagctgcagatggactaaaggaagtctcggtgtcatatggaagtaatggcgaagaggagacaagcaaaacctttgctatgggaggattcatggcagataaggaatgcgaaatgtcc

SEQ ID NO: 51686 - DNA, 960 bp, Oryza sativa
agtcagaagttcttaatttttcttctgtataagagagggcgtcgtgaccaataattaatttttgatgtacactcctataaatatgtttcagaaatgctagaagtattgcgaggactggattagtagtttttattgtcggaaaatgataataaccacccgtgccatttcagcctcgtgatgcatgaactgattgacagatcgatcgattagtcccaaaagcaagaaagcgattctgtctcaatttaatcgcgacataacctctctggctagctaaagctacaaagcttactaggacaatcaggcaggtaggcacacgctaaactcaaatgacccattatggtacgtacaactgaaaacgggctgggggaggacgaatatatgaacggtcctttaatttgcgccatctgatcgacgatcaatcagttgggttacggcctgtcgcgataatgctgccactgagtgcatgaaatccaattaagcgctgacaaagaaagaactcacgccatcgtgtatccaggccctacaccaattaatttagcactgctttgcaagaaactccatgagagaacttccagtgctcaccaaattatcatgtgtagactgaagcaagggcatgcaaacagcccacctgcagctgcctagctacattataatttataagaatttctcatttcaaatgttgcaattctgttaggaaaaagtacgaattaccacccaccaccgaactatcgtggtcgaccgaattaccctaataaacttgaaaaccagacatcattcaccctcaactttcaataccggacaattaccctcctcgacccaatccagatcggttttgttctacgtgacgtacgcgtggcaatccagtcagtattttatttattaaaaaatataggacccacctgtcatactcctcttcccctcttattctctctcttctctctcctatcttcctctctctcg

SEQ ID NO: 51687 - DNA, 2646 bp, Oryza sativa
ctagagcaagagaaggaagctctgaaagaaattgtggtgataatgagtgatagctaagtccatgaatgactaaaaacctccacttattaagagaatacattgtcaaaaacaattagcaattgcatgcacaactgtttatcataattgcaaggtgaccccgacaacacacaacctactgtaatcttcatgtacacacataaacaaatactataattttattatcatcaggtcagtctaaaggtgcagaaaatctccagaaaagaacaagggaagcttcggagcatcatgaaaaggccgaattgtacagatcgtccggattataaaatgtacaattccatataatagtttctgcgcctgtttaatcagaagggtatccacaatcacatgggcaccaagaggtgccattgtatcttccaatcatcaagtcaagaatcaaacctttttctttcaggcatccaagcaaggataagaaataaaattgcctgggttagccacctcatcgagattattatacctccactgttctgtttgcaaaccaagcatcatctggagttttcggcattataaccataaaaaattttaacaacaagcacacttctctccataataatcagaccaatgctactaaacatgtgccctggtgttattgggatttgcttctgagcgagaatacggccagtgaggaaatcatgctgtttgtaactctgcaaaagcaatcatcagcataggcctggttctcacagctgattgcttagcatcttgagaggtgccagagatgatcttcttggattggagcacagatttgtgattggaactcagaggtcctaaagaaaaacaacatagctggctgcttgagataaagaaaagggaagattctttctgtcctgggatacaaacattagttgccgcccctcgatgattgatgcaaagctttctccaggtaagaagtgatccactgactttcctgaaaaataaaggtgaaacatggtatgtactttagcctggcacagcatttgaagataagaggtacagaagcttataaacatgcagatatactataaatctaaggatagatgcaagcaaactgggttttaatgagaatcacaaaaaaaaagagagaacttcaccaacagtgcgctttccctgcatggaatactcatgacgcagaggttgctgagggaaaaaaaagctcatagtagcagcgatggactagctgctgcaggtcgcattcaataatcacacgagaaacaacattaatccttttccaaattatgtaactttgacaaaacatcctttacttttaactggcttgtgcaaaaagtaacatacctgatatgtagaggaagggtgagctatcaagagttccctctaacaaaaaggctgcggtaattaagtcacagtaatctattatataattaaaggaatagaaaaaggagcctccacgttcgctctcatggcctaaaaattctcacattaatcggagaaaaagaaaaagcagagtccatatagaaatacaatttagaaatagcttaaattcggaattaaaaaataaggaatattagaagaggagaccggagtccatatagaaatacaattaggaaatagctgaaattcggaattaaaaaataaggaatattagaagaggagaccggagtccatatagaaatacaattaggaaataactgaaattcggaattaaaaataaggaatattagaagtagagtatagagtccatgtagaaatacaattaggaaataactgaaattcggaattaaaaataaggaatattagaagtagagtatagagtctatatagaaacttaaaactaactaaaatttggaataaacataataaaattaaaagtagagtttagagtccgtataaaaatacaatttacaaatagttaaaattcgaaattaagaaaaaatgggaagaagagtttaatgctaatataggaattcgaaattaaaaattaaataatattgaaagatgagtttagagtccacatagaaatataattagaaataataaaatttcagaaataaaaataaataatattagaagaagaacatatagtctatatagaaatacaatttacagaaaaaagaaatattaaaaaacgagtctagagtccatataggaatatatataatttacaaataactaaaattttatcttaaaaataattaataactaacacgtatataaaatgcaatatgaatattacacattagtagttttgtaaagttattgcaaaatttaaaattatgttgttattttaatatatttgaataatataatgagaaaacatatatgctattatatgagagaaaatataatgatgctagccgcgcaatctgcgcgggccatcatgctagttagaatgtaaagagacaagtggaggtacaaccccaccgacgttttgtaacggacaaagattcttagggggatgataagacaggagcccacgcacgcacacgcttaagagaacaaagggaagaaagctcccacaaccaccagctttaaaagaaggggcaaatggggagggaggcctgcaaagaaaaggagaagagtgccctctaacctacctatgccttcctccaaaatcctgatatcttgagccacttgttgctgccactctgccat

SEQ ID NO: 51688 - DNA, 1065 bp, Oryza sativa
tccttcgtatcctgcgaattttgctacataacatttaaaatttatataatttactgatagacatcgaaaaaatatgtcacgacaaaacgacaaatgacacttttgactcaattagagaaatgaattcgagaaagacgaaaatgcccaccacatgcttcagacatggtgttagagtgaaaatttataaattatgcatacatcgtattccatgttcactttaggcttagctcaaaagcttttgaccgtaggagtatttttgtctttttaaagaatttttcgctctaatcgagtcaaaaataacctgcaacaaattacctatggttttataatgtgtggcaccgttcacttttgatgtgatgtttgatcattcatcttattaaaaaagaaatatgtaaatatcatttattttgttgtgacttattttatcatcaaagaaactatagtcttaacttatacttttacatgtgtataccaaatttatttattttaataaaacgaatggaccaatgttatatgaaaagtcaatggtgttattaaaaaacaaaggtaatagtaagttgtcatagggtaagtttatatatacctgagatctaaaatgcatctatagtgatattcgtctttattagttatctaaactaaaaggattattctttatagctaagctgtatacctatctttaagtaatgttatatacttatatcttcatttagtttttcttttaagctaaagtttcgaggaccaaaacctagctcttttcccccctcaaaacacatacgatctggtcgaaatccactttctccttgcaaccccattgtaatcgtagcaaaaccccattgtaatcgtagcaaaggtatatatgcctcacgatagtactagtgtgcttggtcgtactgcaccaccaacggtatagcttagcctctcagtgatcactaccaatcctaccgccggtactggatcaacaggtcagaagtttggcagcaaaccccagttggcgatgaccttattatgttcggcagcagagcatgacaaaaaacaccaaaaccccccaagtccccaattactcct

SEQ ID NO: 51689 - DNA, 715 bp, Oryza sativa
cctctcaaccaatcacaaccttcccacatttaattccacctactttatgaaaacccatgtccaaccctaaaactccttatattctaggaccgaggtagtaggaaacatgcaacactttggacctatttggatggggtttgtttaggacaagttgctggtaaaatgcaccagcagattgtccccatgggcttgcttactttggtctgagtagagctagattatttgaactcctaggcagaggctaactaagggaatctaagattctaaggtaagtcagatgtggttatcattaatcttcttattttgcatgtcatgaagaaaagaaaaacgtgtcatagattaaacgagaggaactggaattctcaaatttgagtcgagtttaaagttttattaccaaataagtgttatgaccagtgtgttaatgtctgtaatcttggacgatgttgtccatttgctaagtttggcttttggaggtggtatccaacaaattcaggagtgtttgggtattctgaatatgcgagaaatggtactactagatgtcatgaactcatgatggttggatgaccattaaaaaaaagatgaaacaacttacctaatattttttagtggcaacttgtgggcattcaaagatgtgatgtcacacatctaattttccattataaatacaattcttatttttaaatctatgtatacaaaataatcgtatcaatggaaa

SEQ ID NO: 51690 - DNA, 582 bp, Oryza sativa
tttctaattttggattttattttatttttatttcgaattttgattaatcttgtattggattattatatggaaacttctttcaatattacttatttttaattccgaatttcagctatttttagattgtatttctacttggactctccttttcttttttttcttttttctccgattaacgtgggaatttctagcccccacagcgaacatggtgccttctttcaaagctgttttttattataaattaaattttagttgttaaaaataatatcattggatattcatttaaatttaattttatataattatgattttgttgctacaatgaaaaatttaaagttaaagtttagtttttaagactgtactaaatttggacacgccttagcgagttggacggagagatgtatctctaccaatgcataagttttctggtctatttactctttttttttcatccataggtaaaaaaaatatcacattttaattctaattataccggctccaaaatatatatgcacgcactgtgtttgaatcctaatcacctgatctgttgattgatccttactatccatataggataaggaa

SEQ ID NO: 51691 - DNA, 1074 bp, Oryza sativa
gtcctatgcctaaaaccgcaaagtcactgtgtcctgtagcaaaatttgccaaaaaaaatatatatgtcaatacattagaagagcatagttaaaacaattatgttttcttaactactccaaccgttccaaaatataacaacttttggatagataagatatatcatcatactacgaatcgagacatgcaagcgagctcattagtcacttttaggtatacgggtaagtatacattacacttatgacagaggaacttcctccatcttcaaataaatcaattacaggctatgaatttgaataactggtcattgttttattttgagatggatcatatacacagtattgtggcagcacaattggcagggcacgacaccatccctacctcctgtttgggggagtttttggcagtggcatcttatagaatcttcagttgtcagaagctttgtcaaatagttcatattttcacttaaattctataaaattgtagttgtgtaatttagaaaccaaactagaagacaaaaactggattttccagcttttccatatatattctcaccagctgtttctcgaaaccttaatctctcaaaaaaaaaaaaagatcttagtcacgacatagatggtcgtgactcagcaagggtgagattaatacgcatatatcttggccgatatatggttttaggccccgttcgatctctctttgggagatagtttttttttcacgcaaaacaagaaatatcattagcatatgattaattaaatattaactattataaatttaaaaaatggatttatttgctttcttaaaacaactttctatatcgaattttttttaaaaacacaccatttaacatattaaaaaaacgtgcaaatgaaaaaacgagaaagttagaatttggagttgaagaatataactgagcctaagtaccattcaactcaagtacggatgcaggctgcttgtagatacacatatagatatagtgcgtgtctctgcttccttgttaaaatcgtggtgtatggtatcgtcacatatgctaccacgttttaaaatataatatttttaacgctcaaaattaattt

SEQ ID NO: 51692 - DNA, 500 bp, Oryza sativa
ttgggcctttggctttcttcttaagtgccttttggaatgctatgatttgactatatataatacagagggagtaaaaagccaataaacttctacattaatcgggaagaaaagactaaaaatccgtatattgctgcattgcagacatctatcaatgcaaagcgcatgacagcacacctttttctcccttcagtccagggaaacagttactcttaaatcctgataaactggtaaaagcacatatctcttttctctatcattctactgctacagttcactttcaccccgggaaacttcaagcatagcgagcatttcaaatctcatggttgggacaacacaggaatttggacgcacacatggggcagaggcgcagagctcaatgagctagtaatccagcgcctttgtgtttgttttacttatgtgttgtgtcattttctgcactggcactggcactgttattgttttgttgttagcttagctacctttccagtgagggcattctg

SEQ ID NO: 51693 - DNA, 1010 bp, Oryza sativa
ttgcccaacctctttcaagcttttatgagactttgccacataactatgatcagaaacagttattgattcataatcacggcaattgaaaggtgatgctgaaacctaaaaaagggaacacttgagtgagtggtacaccagaaactaatgcatgaaaattgattctctcccagtgcgtcattatattgataaatgaaggcaaagtaaagcatcctagtactacataaaccaggtactctaacatactggaacagtacacttctggactcaagaaaaggctaaagaaagagaacctactattttcaaagaaaaaaaaatcaggaaaagagcaattagaggctggatttatttccatataattatcaaaaaaagaaggaaaagagcaatttcgatttctgggttctcattagaataccttcttaaatgcttaacactttgagatatataagaaataaatgctcaaacattaaacaaaaaaccataaaataagaatacgattcaggaacagtaattgaaacatttaagtttcttaactttgtagtagagaactgcatcatttagaaattcatgttcacagtatgcaacatttgagcaaatttcctcaattaactctgtttctgttttgaattacagaagttgttaatataagggcctactgaccttttcttccccacatgattcaaatgaagaatgtacagtttcagcaggttttttcaccaagtcctcatctgttgtgaccaatattttctcatttatgcagtcaaacgttgaaaagttgtcagttgaactccgcgaatggtttcgattatcatgagaaggggaagcagatctatgttgccgcaaggtctgatgtttcgcacaagcattcctcaagttatcttggctgggacttccaatttgctgcagtcttgatatatcgcagaaagagttgaagtgagactgaccactgtggtaagtatttgatgtatttgggataaaattactgtgaggggaattcttgtccaatgaactgt

SEQ ID NO: 51694 - DNA, 1071 bp, Oryza sativa
tgtattaagggttaagagcttcttccagatctagaagagaactagggttaacgcaagcaaattcccagacaaaactactcccggtgggagagagatgaatcagaaagagaatgtgaatgctcaccaagatcccctcccctccccagctctcctccccggatggagatcggcgcctctcgtcttggcgcaaggagcggacacgacgacgggaacgggacgggagattttctttttcttttatacgcatgtacctttagctaatctagttctaaacaaataaaatcaccatgtagaacaagattaaactacccaaacctatacacacaaacaaaccaactaacctcctgtcaccttaaccgtcctgaactcctgatctgaactctgaaactcctttgaaccaacagcagggagagagggagagcgaaagctgcagcatcggggattcgctcgcagttgaaaaggaaaaccacccagaaaaccaaaccgtcgccgccgccagaaacgcccagcgcgtggaggccaggagcagcacaggtacaacggaaaaatgcaatgcggtgcgaagcgcgcgcggtggagttgctcctctcctcctcccacgaaatcgcagtctttttctccctacttttctatgccctttcctctcttctcactgcccactgttcggttttttggaggaagaagacgagctcagagcacaacaatggtttgggacctccacgcgactccgctacacggccaccgctcgcgcctccccacccgcacgcggcacgtcaccgacatgtgggtcccgtaaaaggtgtgacccacatgtcggtctgtgagacaagtggcaacgcggggtacacgccctcgcaggttgcgagtacttcgccggatgaggaattaaatggcggcgtttagatgaaactgattaaataccgggggtggcgcccgcgtgcgtccctatgcccacccggaaacgtatacagatctgtggaacactgacactgggcaagcgggcccgagagatccgagccatttcgcggtacggcctcgccttgggccatgaggcgcaatggtggaggtggt

SEQ ID NO: 51695 - DNA, 1193 bp, Oryza sativa
gagttcgaacgctctgactttctgacgccgtggcaggcatgcaggtgcagcttcggggcttcggcggcggctgttttgtgaggtcagatgagcgagaacagctgcccaccgcgatctctgcccggtgtcgtgttgctctcaccggaattgaataggagtagctcggtgacgcgcgcgtacgtacgcgcgccagccaccaccaactggaacccatcaccccggcccgcgccggaaaaagaccgagcgccgcatgcaactcaacgcgcaaccaccgagcgccagagagagaggcttctcgattccactacccgcgatggcccaagcgaaccgcccggcgcccgtcagcgcggcagcttagggtgtgtttggttcacggtcatgcataaacgggatatgaccatctatattttatattttgttggatatgacgatccagttttttgtttggtttgtatagatatgacaatccaattttttatttgattggagggatatagcatggatggaaaaagccaaaagttagtgcgacccatttgtcatatatatttttttatcaaaatataatcatctgagatcttgttttaaagatttaattgtaacaaatataatggtgtaatcaatcataaattagataaacggtttaggagaaaaagtcatttggagcttacttaacagaaaatcaaaccaaccacagccaatcagaacaggacacatcacccagaccaaaactggatggcttcatccagccaaatcggccggatgcactcatccagcatatagagagaatattccctattctgggccgccccattcatcctgccctccaaccaaacaacacaaaaaatcaagcggccatctcccatccagattcatccacccaaccaaacacactggtgtggccgccactgcagtctgtagtaataaacgcaccaaagtaccaaacgctggacccacgcaacgctagtgtgcagggtaaacacacacaggtcgagaaaacggactactcctaaatgtgtgcaccgcacagtggtcgaccgatcgatcgatcccgagtcccgacgttttttttgtgctcggtggagcactccggggagcgaggggacatgaatggcacccactagccattcattcaacccgagccaactgggaacaccacgcggcgagtccaccgcgacgacacacacgtactgata

SEQ ID NO: 51696 - DNA, 922 bp, Oryza sativa
tcatcattgcaactgaactcccccatgtcgcactttagatccgcccctgcgtgattgtatagtcacatggtgcttgggctccggttttaatatctgctatatgttgatgctcatgcaacctataggattctataattgcattattttgattctttgaagttatatagaattgtatgtagatacgacgagtcagttctaagattactggctagacttggctgaactggttctttgtgaactttagtggttgcatatatgcttgttgatattgtctatgctgctatgagtgacaaggcctatccaatcatgtcttacctcatcctctaatctgattacccctaaatttgggtctatactgtatgtgtgcgttgtacttaccaagaacttttgttttgtaagtttttcctgcatgaaaaaaatattccctaactgtacaatgcatttctgcgcaagtattcatgctcttttcagtcattcatattcattagattttgaaaagtactgatgtttctttgcttttgttttcaggagatgcctcgctatgatgatcattatggaagcacacgcttgtatgttggtagactgtcttcgcgcactcgttctcgtgacctaaaatatcttttcggcagatatggaaggtaagaacagaacaatgggcattaagagagcttatttctctgaagtataatggatttttctggtaaaattatgataagtcactttcatttggtgtaagtgtaaaacactagtgctgcgctaacgcttgcttaacagttgacattacaacttgttggtacgttcaaatttcaccaaacaaatcaagctgtttcctattaaaattgtgacctttccaaaatgtggtgcaaatcttcggttgtgctcagcataggccagtaaagcaccatatccttcctaccctttc

SEQ ID NO: 51697 - DNA, 579 bp, Oryza sativa
catatttttttctctcaattattccgggtacatccttgtcgtcgagactgtttccgaggattcggcagccataatttttgcccacatcgaatacgtccttgtcatcaagactgtttccaaggattcggtattcatttttttctctcatagatattttattctcttgtacaatgagaaattacgaagctatttgaggaataaaaaatcaataaagcatatacatataagcatttataaatcaaaccatatactaacattaatattgcatattttcttaattcaagtatagagtttaagtgtcatgcatcatctcccttaaaaccaatatctaagcctcataaaaagactaaaatacatacaagctatgctagagacaaataaaccttcatagtattgctagcatgcacaaaaatatactatatgtataaaacaaaacactcttttctcaatttttcttattatgaaattttgcttaataaaaccatgaggtacaaaaactccccctcaaatcatgccaaaaggatgaattattcccaattctccacgaagaaaagcaaagcgattagaatccaaaggttt

SEQ ID NO: 51698 - DNA, 923 bp, Oryza sativa
gaccatatctcaatcggtaatcggtaacaactagacccgtcacagatgacttatccgtgatgggctctatactaatgcccgattgatatgacttagttttttttttccattcgtcatatgaaatgtttatatttgtgagttgatatgtagcaaaataattaactgtagtataataatttattttattattcaaaatagtttttcgggtggtaaatgatttcaaatggaaaaattgtcaacaacaaagttatataacttataatgatttacaacttttattttggtcatttttctatataacttttttttgaacagtttgaatttaaatttgaaaatatgacaacttcaaataacatttttaaatattaaatgatttcaaatgaaaaaaattatcaacaacaaagttgtataacataccaatatttacaacttttattttggtcattttctatataacatttgtttgaacagtttgaatttgaatttgaaaatatgacaactttaaaacaacattttcaaatactaaataatttgaactaaaaaaagtcatcaacaacaaagttgtataactcatcaagatctataacttttattttggtcatttttctatataacgtttttttgaacaatttgaatctaaatttgaaaatatgataacttcaaataacattttcatatactaaatgatttcaactaaaaaagtcattaacgacaaagttgtataactcatcaagatctataactttattttgtcatttttctatataacgtttttttaactgtttgaatttgaatttgaaaatatgacaacttcaaacaacattttcatatactaaatgatttcaactaaaaaagtcatcaacaacaaagttgtataactcaccaagatctataacttttatgtttgtcatttcttcatccga

SEQ ID NO: 51699 - DNA, 591 bp, Oryza sativa
gaattccaacatatgagacataattgatggatgtatatcagacataattgatggatgtatgcgatatatcccaccgacgtgactataagtattatctcacaaattagttatatattgtaaataagttttgaaaaaaaataaatacattatccaaatgattaaaggtgtctcatgtgattatcaacgataggtgttgaaaagaaaccaaacgctaaactatagatatttgttaaaatttaaataataagatagtgctttgaagattatcttggtggtatgtcttcttagctataattttttagtaccaccgaatgaacctcggtcattttttaaagagaatattttgtttatatcatacttatttatgaagtaatagttaacaccataaataaatggtgtttactctataccataaatctactcgaaaattaaaacaaaaacactattctgatcacattcatcttctctttgtcctttactgaagggcaccaagcatagacaacagagtttgctacgctaacataagtatagcaagggcaaacatatggctaagttgaagtgtgctagacttactatttatcgatgccatac

SEQ ID NO: 51700 - DNA, 646 bp, Oryza sativa
cgcctcatgtttcccctttctattaattctactcaaatgatctattttatcttaatatgaggtgctctgctgatcctttatcaggccaggtcctttgatcaaacgcttgtgttaagaagacgcacggactaatcaggtcgttcaacccaggccttgatctcatagttggcttgtcattctgcaatccgataatctactcaaccatgttagtgttgtttctctgcatgacaaggtgcaactctgctcatgtacacatgatgttatggctcagtagttccctctgcctcccaggcctagctagctacatgcagttttggtatatctaaactgtaatgttcatgcatggctactggacaaatggacatggaggatgctgcttgatatagataaaattcatcgagaaggaaacgaagtagttggtctggtccatccatatgtccacctaaggtaattatagaccactcaagaggattttcgggcaggctcttcatcctgcactgttgtcatgtaaagtactcgttctgaactagctagcaatgcgcgacatattccaacaatttttaggatgcaactttcgaagtcttccactttcagactatcaaactttagcaatacaacaaaaattacattaatagatttatcaaac

SEQ ID NO: 51701 - DNA, 1031 bp, Oryza sativa
taggccgccggatggaaggttctgtactagtgcgattaattggcgccacttgtcactagagaagaagccattggtaggtacttctactccatgccatcactgcatcacatgagttgtaaaatgtttctttctttctttcttatatatggacaagatgagcatacatgttctctcacgcttcctatggaaatctctcaaattagtggcttccatatcgacttagttttgcaaggaatgcatgttaaggagtaggcatataagagttaaaaacgctattggtaggcaatgttgtatttaaattttttcaaaaaaattgagtgggtgcactatgggcttcctattagtgtgccttatgtttctaacccgacaacattctttagacgattcagatcgctgtgagaagtgcgggggaagggctctttagtcccggtttacaaccctgtcccaggacacccatctttagacccgtttaaaataaccgagactaaagatccatcggtcctattggtgttactaacaggaacaccaaccaccaaccaggactaaagtttttttttcattgcttttttgctgcttgcatctattgattttgagcaccaacgccgtcacccccaaattcccacaaatcatccacaaatcaagcacaataaaatcattcacaattcacaagctcatcaacaaaatcatccacaatccacaaatcattctcaaaagagtaaaatacactggcggtccttaaacttgtcaggaggtttcacttagtccacgaacttgcaaagcacacatcgaggtccctaaacttggtatattgtatcatcccggtctaaagccgcatttgaccgtggtcttgcctacgtggcatgccatgtggacgatgacatggaattatttaatttttttctcccttcttccttcttttttctctttcttccttcttatttctcggtggtgagaggcggcactaggggagtggctgtcgtggtggtgcttggcgaggcaccggccgaccggcgccacggagggagggcggc

SEQ ID NO: 51702 - DNA, 2376 bp, Oryza sativa
tctcccttccatcgctgccgcctgttcccgcccgagcagagacaacgccgccgccgagctttcctctcctctccacagctgccagctcctctctcaccgtcgcctctctcctgcgctgccgctaggtccgacgcggccacggtctcctcacaccggtcggccgctgcctctccccaccttcttcggatctcagccggagaaaaaagaaggaagaaagagaaaaaagaaggaagaagggagaaaaaataaaaaaaaaattccatgtcatcgtccacgtggcatgccacgtaggctagaccacggtcaaacgcggctttggaccgggatgatacaataaaccaagtttagggatctcgatgtgcgctttacaagttcgtggacctaagtgaaaccacatgacaagtttaaggcccgctggcgcatttaactcttctcaaaattatccacaaaatcatccccaaatcttaaaaaaatctacaaatcattcacaaaatctaaaaaaaatccacaaagccacagccgccgctgccgctgcttccgccgggccgccacccggcctcccctcccactggatctggcggaggatgaacgtgcagagatgtaacctagagggggggtgaataggctttcctgaaaaattactcgtacaatcgcatcggtcaaattcaacagggcctggaacctcctggtgatgaacaccggaacttccgggtagtgatgtgtaggccggaatttctggagttcttgagccaggaacttccgggtgacataatagattgaaaacagcaaggaaatttaggtcctagctaagtaacttcaagcacagagaaatacagagtactatcaaacacaaccacataacatgcacaagagagacaaatgagattttttcctgaagttcggatcacacggatcctactctccgttgaggtgctccaatgagccaggtctcgattaacccttgcctcacttatgcaaagatcctagaagaagtccacagccttgaactcaacacctctaggtcattttctagaatgagagaatccattctataccaccgagtttgttagagttcaacgatatgccatcgacattgtttctttctataatataccgacgacgttatcaattgttctataatacgccattgggctaggtcttattttcaaaaatacccaaaatacccttacaaacataaaattaacaattgatttaactcattacaagtctcacaaaaatatgaaattttttatgtggcccccgtacacaacatagaagtttgtatacaagtttcaagtttttctggtatatttaatttttagaaaaaaaatattttgtgtcgtatatgagagaaaatatgcttatataagagataatagcacaaaaatatcttatatagtttatgaaagatgatttatattaaaaacaacaataaaaaagtattttatatggcatataacaaataagttatattttttataaaaaaatagaaatgtaaaaaacttgaaacttctttacgaatttccatgttgtataaggaggccacataaaagttttcatatttttctgaaacttctaatgaggtaaatgaattgttaaccttgtatgtctataagggcattttgggtatttttttaaaaaaggctcagcccaatggtgtatcgtagaacaattgataaagtcaccggtatattatagaaagagacaatgttgatggcaaatcattgaactcgaacaaactcagtggtatagaatggattctctcttctagaattgagtgaccaccaagatccaactcacaattccttctagaaaagaccacaagtgcaagttgctctacctaggacaacctctgaaaactcagcacaagaatctttactcacttacctcgtttccttgcggaggtgagaaaaaccttcacaaaccttcctgggacatccacaagatctttggaagttcacaggcgacacctaaccgtctaggagaagatcaccaagagtaataagcccaaggtatccaaagtgctcaatcaaacctactccaaatcactcctacactctcatctattctctcaatatcttaagataggctctagatttgagtggaggaagcaaagggaccttgggaaaggctagaaaaccctaggacttgaaagaactgaagtggaatggccaaaaggtgagctggggacgatatccataaatataacggctaggtgacatcatctaaccactactcacaggtttgaactggaaacctgccaggaagttccgggccaaagtgctaggaacttccgcgcaacacttaggaaaattctcgctatacttcagcgcccggaagttccgaacagaaccccgggtgggactctctgtcccg

SEQ ID NO: 51703 - DNA, 687 bp, Oryza sativa
tgttcttcattgtaatctgtggttttccatatcaatctcataaaaaatggattatggctattaccttacgagggacctgaagcagtataatccttgttttcttgtttgcttgatgtcgtatcgtgtagatcctcataccaacgtaccccaataccctatacatctggtctacgggtatcccccgtcaacaaccctatactaatctaattccctccttcctctccctcttcccaatcccatctcaatgagaatgctcatgctatcacattgcacgacccatggctatgcctctctccaccccacttcctttcgtacatcgagaaccgcccctgatagtgatctctcaaatgtcttcctcccttccttcttctccacacaccactctcactagtcttcttccattccgatgcctttcccctatcatgcctctcctgccccggtctatcaccgtaacccctctccctaaccaatccaacaaatcacccctgcctctagcgctgccccaatcaccgtcctccatccctacagctctagcgccaccgtgacaccctcatcacctacttgtctccaccgcctgctacccattgcctatctttctccatccaggccatccctttaacatcaccctcactcactgccccataccccgtaccatctcttggtatgagaatctcacagggctgcagg

SEQ ID NO: 51704 - DNA, 669 bp, Oryza sativa
ctagcagcttatttatacggtcttgtaaagtaaagaattaagatcagagcagagtatttctacacaaacgataattttagtgcaaggcattgaactagtcagaagacgtatgaacaaaattgaattaaaacattctcatgattagtacatatatacaagctgtaactacatctttgatattataatagggtttgtgtgaactaaaattttgtgtttcattatttgcttcagacattgtatgcagatattgttgtatatatgcttctttaattcccatggttgtaaaacttataagtgattactaattgctttgttcatatctcccggccgtcagaattttcatttcattatctaataaaaaaatgatgaggagacgttgcataggggtacacacttacgagttacgatgtatatttgattcccaactacctgttactagtttacaatctagcaactttggagacatctcttggcatgggcaacctgtgagcccagaaaaggagacaagtaagtgtcgagtatcgagagatgttatgataggatggggatactaacagatttagaaagtacatatttttacttaaaaatataatatgttgcataaattaaagcatataaattgcttttagtaaatctaattgatttttatgtgaacttaagcatatttat

SEQ ID NO: 51705 - DNA, 641 bp, Oryza sativa
aactattttttattataatatataaaaatatcaaaacatatatgattttattaaagtattttttaacactactctacgcatatggttttcatatttttaagataaatattttggaaattatttatagtcaaagatttcaaagtttgactttacccttgttcaaagcgactaatattgtcagcccgaagggagtattactccggatttgagctattacttaatcatcaccttgtacgataaaatttgaattcatggctagaaattatgttgttcccaattgcattatgttgatgagctataatgctatcattctctgttgttctcaacatatctcttccaagactttcatcaaaagttggttattaaatttgtagaatcaaacagaaagaactaaacctatggtgggaatatgtttagtaggatatatcggggcttttaggtcctagaagagagcaaatgctaattgccaagacaattcaattcaattatatgataaaaaggctaaagtgttgaaagaggaaagagggaggaattgatacgaaaagcgtaggatttaaccactatctagtcaaatatacgtaaacatagctaagttctatgatgtttacgggttcacatcctctaccataatgtcactacca

SEQ ID NO: 51706 - DNA, 636 bp, Oryza sativa
gtcattagaactactatcggaccaaccatttctggccttcaatctcataagctcaagcaccatccacaacaatgtgaaatccttctcacagccctttgcctcattgtacaatagatcattcaatgcctttttcaatgcatcaaagttatccaacccacgggcggacccagcaacaatcttaggttcagcatgacgcaacatctcttccaaatctgcaaaattaccatcatctacgctgacattaccatcatcggcatcatcaactgtactgtgctgaccattgccaccaacaacatcatcatcatcaacaagttctactgcacttcttcttcttcttcttcttcttcttcttcttcttcttcttcttcagctactacaatgacatcctcgtcccagctcaacacttcgtcgtgtactgtagcctggtttggaacttgcttgcttgggatctttccatgatgtgaccagtttgtgtatccctcaacaaatccatgcatcaccaagtgttgctcgattacagatggatcattccaacttttctgatttttgcagtgcacgcatggacatctaatatctttggtcttcttagatgcagcattcttcttagctgctttcatgaatatgtcgactcattca

SEQ ID NO: 51707 - DNA, 530 bp, Oryza sativa
atgtgttaggctttggagacatcgggatcatggttatggttatgcctgtatgacatcgtcatggtgaatggaagcatagttgttttggttcgtgataatcatgtcaggtaccttttatcgtcttggtgaattttacgagatgttttgatcgatttagaagaaacaaaattcatagtttttgcaattactcctgaaatagcttcaaattccaacaatctcattcactgtagcttgttggtaccaaagattaaagaaggcacaggacaagcagtatttatgaaacttatctattggttgaaattaaggcgacaatgtggctattgaaattaagtgaaaagtaaaaactgaattggctagcagagagtgcagtggagttggtaacggtcttgctagctgtgcttgattctgtaacacagttcgatggggggaattcctcgtctagtgttcgacagaaaaaatcctaagttaatatgtaaatatttattcatttaataaaactctcttttccattaaaagaaaggaaaagcacc

SEQ ID NO: 51708 - DNA, 1281 bp, Oryza sativa
aacgagctagggttccacaggagtcagaggacccggacaagagaagaaagacaacgcccgcctgacgcgcgggccccacgcggtcgggcgacggcgtcagcgcgcgcacgcgcgcggcacgtgcgaaaggggaacggctcgggggctggggcggcttgggccggcggccggcccaggaagagaggagggagaggcggcctgggccgggcaggccgggaggggaggggaagagagaggcagcccgggagggagagggaagagggaggtgggccgaggggaagggggcccaagaggaggagggagagaaaaaagggaggagaggaggacttcggactgggcttggcccaaaggaggaagaggagggatttttaggttttctttttattgaactttgataattgtttttgttgtttaataattatttccggtgctctgaaaattcaagcaaaatttgagggctcctttttagaccaaggagaatttaacaaaaattctccgggccacatttgaatttttcttgcacgtattttagtgtttgccaatttctttccgaattttaattaattctattattccttttagaaaatggattttaatttggaatggatttatcaggacgtgacaaatccaccccccttacaggaatctcgtccccgagattcgaggaggctagcaagaagataggttgggcggtcttctcttcttgtccgacttcttccgtcgcgtcttttataacaaacttgcctagcaaaacttctccactctggactgcttggctcgatctcctattgcagatggaatcttctcttcacctgacttttccctggttgcacctctagctgacttcgactggattatggcacttgaagatgggacttccgttctagaacttctcataattcatatctttggcgtcaacctcatacaagttacccacttcatgtcatgcgtcgagatcagctcgtcattactaagataccatgcttgtcatcatttagcattcaaagtattcctttacacattcagccctgacgtattctttttagatttctcttatcaatcacctttcgacctacttcttggttcgataataaacacctttgctggtatcttctatcaatcacctcttaaactttgtcaaccaagtactcttcactccgagagttgtggatgcttctggtgacgatggggtcctttggcttgctgcctttcagtgaaaccttgaagtgtttcgccaaaagctatactaactgtcgttgcctttgatccgaaaagactcat

SEQ ID NO: 51709 - DNA, 1476 bp, Oryza sativa
tatgataactcgacgaattacataaaaaagattagagtgtcataaatatggaagcactaatcccgagaacgcaagccaccataacaagttttaccccttgttgaagatcgaaaccgatgcagctcaacccgaaagtaagaactcgtcgaaacaaaacgaaagtaaaaagggtggcaatgcaccgagattgtattgaacgtgtgttagtttgattacatggggctcgggtctatttatacccgagaattacaaaatatgtccatatcggacacgactcttatctctaacaaactctaagataccataagtctttgcggcagacttttgcccaaacatatctctaagaaaattacataaaatatcctaattaattgatacagttgccttctcaggactctatacatgcgtagcaattatcatgaagcacatcaacctaaaccgacaacatatgttgtgtcatattgtcggattcggctcaatcggctaacctcgtccgacttgaactctgccgatcttagtcgtagccgattcgaacttcagccgatcctcactctgtttccgggacgatttccatctcgaattccatctcggtttcttcttcatctccgatccttggattaccaaatttggtcgttaacagctgtgttgctgtgtttacttccgtttaaacttctaaaaatttcgtcacatcaaatgtttggatacatgtatggagtattaaatgtggacgaaaaaaaaccagttgcacattttgcatataaattgcgagactaatcttttgagcctaattacgccatgatttgataatgtggtgctatagtaaacatttgctaataacagattaattaggctaaatagattcgtctcacagtttacaggcagaatctgtaatttgttttgttctttgtctacatttaatacttcaaatgtgtgttcgtatacttaaatttttttaaaaggaactaaacatggccgcagtcgtcaggaacagttgcagttacagctgcacccaatctgaatcctcgcttgagctgcatattgcagctgttaagcggtcacagtgcactgatgtcgcgttctgtcccgagcagccacattgaagattcatcgccacgcacacgcctgttgttcccgactgaaaaccgcggagccaaatgaagctacacgtttttcgtcggaatttggcaggcgtggggcgaagcacagggcaagtgacgcattgggtgggggcatggccccacgcgacgcccctcacccgtgtgacggcggaagcggcagcatagggagaagaagagaagatggtatggcggtggcctagggcagagatgttggcggcggaggaagaggcggcgacagatctggcacctaacctcattgtcatcgtcgttccgtgctgcctcggagcgtagcagcgacaaatcagctgtgtcgccagaacacccgtcacgccgtctgtcgtggacgcaccaccgtgcc

SEQ ID NO: 51710 - DNA, 1208 bp, Oryza sativa
aaaagtatgtcgggcatataatgctatagacaagtcatgtatgcccgaatgaaatgtctcatagccaaaacccaataagtagtgatgatgaagagacatatcaagacttatgaaacatcacaacataggatgaactccttctaaatacgtgcatagcaaagagtgaaaagaaatctttatgcactttcacaaaagaaatgaaggaacaaaagaatccatcctatattatgaaatcaaggttgcaaagaaaatccatagaagcaataatgaagtctaccttgggagtcatccacttccaacatgagaccaaagaataaactcaatttaaaccattagtcttccaaggtatagaataaacttcccctcaaggtgtgcatataaggataaatttaatgcatacatatgcactttactaaaatgagaatcggggaggagtttacactatattttgggtcaaggaggcaaatatcaccaaaagaaataaattgaaggactagaattgtaaagcacactttcataaacctcacatctcaagatgatggtgcttaaccaatctcatccttcttcacccattccttcggttgtcataaatcaatctccccttgatccatcattatctcttttctctatttgaatcaatagaaaagagaaagcatcaaaagcacacgagtttcacaaataatgatccttttgatgtggaggaaaattggatcacttatttgtgaaacctcataatatagactaaattctcccaaaagtaatgcacacatatggtggaaggcaaatttatgtgcattatttgacatttaaatcaagcaagggaatttaatccatattatgaaaggtagctagataaaatataagatgaaaagttaattgaattaccacttgtgaatagcatacctttgagaatgtttcacttctcatgagactaaacataaaatacacttaacaagaagttagtctaaaaaaatacaaaacataggacatgctccccctaaatatgtgcatgcaagcatttgaattacttgatagaagcatgcacttgtctaatgaaaagaaatgaggagtacaccctataatttcaacaatttgcacataaatgatttgcaagaatatacatgtgccaaacattgggtagtaataatgcatgtaaattgccacaagataatagatggcaatcaaccataagaaagaatattcatgac

SEQ ID NO: 51711 - DNA, 525 bp, Oryza sativa
tctaattcctgcagccgcaattggtacagaaaattctagcatggcagtccctagccaggtgacctttctctttgcatctaagacaaacaagcttctgattagtagccataccagcaggcgtggagccagagttgggaaggtcccccttctgctgctctgtgtgcacctctgtctctcctttctgcccttgatcaatctccttcagcttcaccgggcgatactgcagttcctgcttctcctgaccttgttgggggccttttgaatcagcccctttgtctccctcagatccttcaccatggaatcgccttgcgggttgaaattgaggaggttgatttggaggatcttggaaaccatcccatctcctcccagcaccacctcccccatgaccaccccactgattgttgcggaaatcttgccgcggctgattccgccctcgccatgcaccaccctgattagccatcctgttcccctgaacaaacttcgcaaaccggcgagaatcaccggagatggtccctggccaccttg

SEQ ID NO: 51712 - DNA, 1411 bp, Oryza sativa
ggttggatcaagaatgtgctaattctgctcgtttcttttgatcaccatacttgtcaactcctgacgagctgcttagctgcaattcgaggcaaatttcagaatcttaaacgaactcgaaccaaaacacaaacaccaaaaaaagctctgattcttttattcttcagaaaaggagtaactgttttgtcaaaggaaaatgcgcccgttgcaaacaaacccaaagctgactgctaatatctcgggccagcccacttcacgattatctgtcctgaaaagtttcggcccagtcacctatagccgcctataagcccactagtccctgcaacgtctaacatatctcccttctccgctaatcaaaatcaaacccatccaacgtgctgtaaaacgttagtagtaaaacgattttgctatatatttattaaaaatctgttaaatgtaaatacaatataattgtgtagtataattatatgtaactataatgctcataatttttatatatgtaactttcatataattttaaacggtaagatttatttcaagatttgtgtaagttgggatgaaaaaaataatagtgtgcgcatgggtgagaagattcggtcttacgacttccggggcgcaaaaataacattttaccgtgggatttttgaaaggtagatacaaattgtattttagttacactataaactatgattatccttgtactagtatttatgtatgtgcataataaatgtatagctagttccgtagtaaaagaaaaaacaacatctctccttcaggcgtccccaccaccccaacggccttccgcgcagaggccaacgggccaaacccctcttgtgggccgtcttgtactggcccactacgcagacagcgccgtaccgtaccgtacaagcttctcgccgcgcgcgcggtgcggcccagcgagccacgtgaacgaacgcgttaagttcatctaaggtcccttaatttgtcgacgaatccgattttcgtccttcaaccaaaaaaaccagttacaactggtccctcaactgtcaaaaccagtgcagatgaggtccctcagcggtttggatggtggttttggctgatgtggcattgacatggcacttacgtggcaatgtgagctggaaaaataataaatctcgtgggacccacatatcagtttcacccaaaaattaattttaaaaaggtggggcccacgtggcccccacctgtcattctcagcctcctcttcttcctcatctccccatctccctctctcttcaactctcttcctctcctttctcgcgacgcgcgcgacggcggaggctcggctctggcggctgtggacggaagaggtaggggcggcgggaggtggacctagctgtggcgaccggcggagaggaactgggcatcggcagcggaagcggagtctcgaagg

SEQ ID NO: 51713 - DNA, 3148 bp, Oryza sativa
attcctgcagccctgagcaagaaagagcctgcatagaatctactacagagttcatcagtgtatgcaaagaaattaacttctcagaaaactactgattgtggtgaaaggataacaataggattgtatccacttgaactgatagctagatcgaatagtgcaaatcaagccatagtgaaagaaaatgatgtacattcagattcagataatccacatagaggactattgggctgaagaagggaatcggaagactcactttcagctgaagcactctacactctgcactctcacctgcaaaagagaggatggcacacgtccgtgagaaccgagtgcgtggtgtgggcagactatgaaccttacaacggcggcaccactggaggcgcggcagagtgccgttggaaggcaggaccacagggccgtgacgggatggtgatacgagccgaaaggcatattcacgggggagtcgactgtgtgcggcagcggagacaggcttcatgacatacagatccacggcgccggcgagggcagggcgcggtggtgtgtggcggcggtagggaggagcggagcgaggagcgcgcggcggagtcagctccgttgggggcaggccacgatggagtgtgtcagcggcggggaggcgcggagcacgctggagtcagtggagcacgctggagcgtcgtgtagtcatcacgcgggggatggggccgaggtcggctccggtcgcggcggtggacctcagcgccggtgccggcggatggggccgaggtcagaaccggccgcggcggctccggctgcagggaaaaagcagcggctctggcggtggggatgcggcggcagtccacacggggaagaatcatatgctccggcggcggcagtccatgcggggaggatatccagcgaggatgcggcggcgcagcggcagaacatccggggaggaggaggagctagcgaggaggaagagaagcgaagtcttcgcgtgtggagcgatgtcttcgcgagtggaggaggagtgaagtattcggcgtggcgtggatggatggatcatgcggtggtgaaatcaagcgcgcagatggacggtagagatcgattcgagtgatttggcctgtaggattggagggggacaactgcttctttttatattagtactagtgatcgtgcacgtgcaatgcacttatgatcaatatttgattgaaccatctacctacattgatgtgtagaatgtttaaaatgttttatgtctagttgcacacagttaatcaatgttttatgtctagttgcacacaatgttttaaaatgtttaaaatgttttattgaatcttgaacaacccaattaatcaactttgtataaataatattgtaactccatagtattacaaataagcaagtgctaactgctaaggatctaacataagaaacaaaaactcttaaatggtcatctcttaattcgtatgatccttgttttcaaccattttttatgaacatgaaaaatcctagaacaatactacatgagcaaccaaaactccatttagtgtccatagttctcacaagctccatttatcctttaaggagtgtatgcctgccattctgtcccaaaggaggcttaccttgctccaaaacagatttggtccaccaaattatagttttcacagcgttcagtgtcactgacttcaaataatagagcttcttctccttaatctctagtgatggacgacaacttgcctctcgatcactactattgttagtggacgctaccaattggacaataggactcccaatatcacttctgtcaagagtaccgatccaaccagtttattgcataaaccaacttcaaataccagaaatataatgaatattttcatgattagtttgatccggcacctcaaaaacttccttcataatctacagttaatttccatagtttagttatgagccttcatgttgtctatatcggggatggagattaaatttaagtcatctacattagaagctatgaaatttgataaaaaaaattaggattcctaaggatgatggtaactaaacttattcaagataaggtggcaactggagatttgattataaaatttatattcttgacgaaagctatatataacttaaaccaggtcacaaaaaatgattctttattagcaaaaaatctactcaataagacattagacatactttggcattccaaaatacttagtagtttcttccagattgctacatttatagctaataaggaagacataattcaatacaaatactgagagtgcacaaagtgaactggagaagtaaaatatcatctggtatgaaaacagagttcacattattccagtgctaaaaaatagttcacgcattgtgtgaaaaccataaggaaaagcatttagcaaagttgacaggaaaaaatgttttccccaaacaaaacagtatcaattggggatttaaatccaaagcgtgatcatttacttcgcttcagttattcactttgtttattaaactaatatgcatgaatcaatttcactctgtttgttaaactaatataaaggagtcaccttgcatattattattccttcaagcctcattactcctcattcctttctgttgactcttctcactgcatatgcacctgatctcccttgcacatgtaaaataaattgaccgagccaagtatcaatagcatgaatccaacaaattcttgctatagagctgtatataccgttttccacggctatggtgcaccatatattcagatggaaactaagatctgaactaaattaaaaaagtgtgaacttgcctgtgaacaaattgtacaggcacaatttaaatactttggaaacagaattgtgcaaaaggaaaaatataataacctctccattatggacacctgctctgcaacgggtaattgtctaaccagacagtaaatgcaaaaattggctgagaacatacaaatagtaagcttcttggagaaaacgatcaaacaaattctgacatacaaaaagtaagcttcctagagtgataattttgtaagatgcagtgcaacattttaattacacgtgaaaaagcaaacctccagtgaaagatcgaagatactggtgctccaagactgtggacctaattccagataattcattcaggtcaggaataatttgaattgaca

SEQ ID NO: 51714 - DNA, 559 bp, Oryza sativa
tacagtccatgttaattaccaagtggcgtgttaattaagcatgttacagttttgtactaaactaatctagcataaaagttgtgcaaattgtcacctaacctgtgtgaaataggagtggcctagtagtagtagatccaattacccgacatgtcgaccaggcatgcatgtgcgtctcctgccgttacacggacaacggacaaaaacagtagttaatgcctcatttgaaaagtccatatcagtccctggcaaccactagtaattagctggcacatatcattaccatttcatcaagtagcgattattataacattccattctttttaagtctctgttaccgtactatctagcgaattaacaatcatccataattgctagtagatccatgtgctccagcactatatactagtacaggctacaaatacacagctcatgtgacctatacagactcactgttgcagtagtagtagtactaccagtacagtatttagtgcggcaatttttcttttttattactcctccattgatatagcactgcacagtgactgacttgtcaatgcct

SEQ ID NO: 51715 - DNA, 1258 bp, Oryza sativa
ctattttatggttgccggctgagtactggaatttcgttagaagaacttctaagtttaaaatatggtgcaaaacaaagctggcaagtggcaacaaccgtagactccaagtcttggagtgcaatgcgtagccaaccagacaatcaccgacgcatgggtagatcagcatctggacggacttgctagtgcttctcagcttagcaacgacgcgtgtaaattgcggccatatagcctatagcaacatgcgaactaccgcttgcgtttgcgtggacaaaaaatggttttccatttcacctactacgcgcaagcaaccaacgggccaaagcaagcagagacggtggtagtactacggtgagctgcgtgtgtgctgtgcagatgtaatgcattttttccaccgacatgaattaactaacgacatcaattatcagcgagcataattgacacccatatatgtatactaatgcatgcactgtttggtactaatataatatggttccaatttgatgattaatatcattggcatgtgcaaacgtacatgattattacatccacaaattactacatgaagccagtatattatagatatttaaatccgagtacctaggaaaataccgtaaaatattcgatggaagagagcaagatatcccttcaaatagcctattctaacagggaattcctatatcttaaaattattttattaagttgatgagaaaatccataaacgctctacggagtaccagtaggagaaatagaagtcagtttttgactatccgatatagtataccccaagagagtttttacactagttacagtttgccttgcagtggtagtcacggattgtggagttaaaaatcacggcaaaattgaagttattactcacccgtgaccgtagcacggacgtacgcacgattccctgcacctggggggggggggggggggggccttgggccacggctgttgctgttgctgttgccgctgtcctccagcacagagcgatgcgaaattgattgttccaggctggtgttttctcccaccccttcttccatagtaccatacctgcttggctgcgtgcaccgcagcaacgagtgtaccccaaaccacgttattgtggatcgatcatgagtgattagccttttcacgggaggaatgcgtaaataaatgatggataaacctgcaggccagtgtcggtaccgcatttaattagggaatcatcgagctgtggtttattattagtcgagcggaagaaaagggatttgtagcg

SEQ ID NO: 51716 - DNA, 3616 bp, Oryza sativa
gtcgtggcacggctttgcgccgcccttgggtgcgcatcctagccggcgaagcaggagccgctcagtggtcgtcgctgcacgcgcgcaccagcttgccggaccaccgtcgttccgctcactcgtcgccggagagaaatgggatcaagagagatggatttgggacctagggttttgcccctctccccggtcgatgcttcattcgtcgcggggatgattggagccgtccattagattggacggctcagattcgcccagcattaggccgtcgccgccgttgattacgctgcgcccaatgggccgcagaagtgtatcggtccgtccccgcatatgtgggccgcgctcagttgctcagcttgcgggccgtcgaattgactcaactcaccaaagatgggctagcccaagtttgggccggcttgggaagacctgggccgaaagcaaatttgatcaaacaatgtggctcacatttttcaaattaaagtccattggataaactcttaagtaggctcgaaaaataaatctaaaactaaatcctaaatccatgctaattgataaaattagactcggttctacctatttgttaatatatcaaattagacttgatttttacagaattgaggttttcaaggtgtcacactatcaaacggtgtttttcctgtagcaacgcacgggcactattgctagttagaaataatgtgtaagatagctagacgacgatataaacttacataaggtgatgtggtttatcataatttaaatagtatatagaatgatgatccaaatgtaaaagtaatatgatgtggctttatgagagaagataatgagggagataattgcgaccatagattaataatttgatggctagaaacaatttgaggtgatatggcttaatgagaaaagagagaaataacattaactaagtgaggatgaattgtctaggtatatagatattatacaaaatgatggggagatatattgaaatattttgagaattatgtggaatgatgatttaacatgctcggatttttaaagctctaaaattttagtgagggtgaactatataggcatataggatattataaaaagtgatggagaaatatattgaaatattatgtgaattatgtgtgatgataatttaattatcatgcttgtattttaaagctctaaaacttaataaattagcatgcttacatgaggtttgagatgtaataattgttagtggataatgtggcatctttgcatgttgagctttagaatttagaagaccttaactttatagaaagataggatattaagataatggaaaatgtatttcatctccagactccggttatatctaccctatagttcaacaaatactttcactcatcactcatcactcattctttcatctaccctaaagtttaacaaatactttcactcatcactcaccactcattctttcatgcctcactcaacggtctagattatccgattgagatctgacggccggaatagctcccgcgtaatctcgcccatgcgccccaaaatttcgcccttttttcatcccgatcgattctagatcgcgaaaaaatccggcccctatcagttcgctttttttctaatataagtcaaaacggtaataagccaaaacggtttattagggaataaaaataaatttgtaggtaaaacttatatatatatatatatatatatatatatatgttctttgtaacttaaaagccaatgctgaaaaagaaactacgtagaaaatatcttaaaatcaatcttaaaattaagtttgaaaatttaaaatttggcttattgggccgccctcggcgccgccgctccctcgcagcctcgcccttcacctctccgctgacgccgcccgtgcctcaccacctctgtcgttccaccgcgccactacggctcctccctccccatcgtccccatcgccccctcgccgcgccacttccccatcggccgccccgatgcacgccgcgtccccccgcgccactacgacgcctccctccccggtgtccccatcccccccccctcgccgcaccacttccccatccgccgccccgatgcacgccgtcgcgtcgcccgcgcctcaccgcccccggcgtcccccgcaccagcggcagaatggcgcaggccacttcatgttccccaggtacttcgaatctgaggcctcctggttgtggaacaaggaatcactagcaccctcctccctctctgctctactcttcttcttgcaaatggctgcttctggattcctgtgtcctgcctgatgcttgcttgcttgtgctttgcaaaggattaacgcctagacgtcgtgcattggatctggcaggagtgcaattgaattcctcatgctactcatttcagatgattcagccacctgtagaaaatgttgagtgcatgataaaaaaaaactaaattttcctgttgtttacttgtaaattgggatttgcactacagcaatctacaaaatctacatttttcttatctgttggaatggggcggtgtggatttttggttaatttttccaacggcaggattttagctcgatgatacatcacggcagatgcacttggttctgttcaggaaagattaactatgcattctttatttactgattaatattagtatgctttacattctagcgtgtgaaactgttaatgttagtactgcatttcctttacttggttgtaggattcatgtggtctcacttgtgttgatgttttagcaattataattcagattgccctggatggcatagcatatgaatgatctgagatgtcttatacccctaatatttacatgcaggattatcattacttatttgcgtttgttgcaccgtcatttcatttatgtaggtattgcctcgtgatgaagcaacatttcggtttgtcaatgaagccaacaagaccaagagcggtagttctctgtgtcacaaggtagctgaccattattagatcgaacaatggttttatcaggacctagcatacatattcagacaggtggtctacggcgtggcagcggtgcggtcacaagttccaccacggtgagtgcctttctgcgttcatatctctctgtactgaattgatcttgactagcataattatatgctatcatgtttgtacacactgcaattatttctcatatttttacctccaatcgtatggcagcaggttcatggtagcacatgggtttggtaaatctattccaacgaaaaatggtagtgtttgatcattcccttcgttttgtatagctttggttaaccttctgggtgaggtgcactacaattccttgtatgccattgaagttgagtgcttctgcttttttgtgatatatgggagtgaagaaaaggtttcctacaattcctctacttggcctcagatcaaatgatttgaggggcagaaaacgaaacatgatggtattcagtatcaaagctaagtttttttattctttttgcagtcataaaatttgatggaatactaatgcctgttgcagggtaatttgccctcaatctgaggtattgccatgagtattatcattttctccctgcaaattgcaacaaggtaatttgctgctagaaactttgcgcatctatttttttaggaaaaagtacgaa

SEQ ID NO: 51717 - DNA, 1797 bp, Oryza sativa
aattcccgaggccactaaaagtgttactactccactactacacaaaactaatcaatccaatctatactagcctaatccaattgtgcaggattacgtacaagtaggaccggccgacaggcattgcttccagggttacattgcatgcctctcaactgcacacaaggttatgtactgtcacgaaatgtttggatctcgtcgtccccatagccaacctggtagtactttcagtatcagtacatgacacagcaacagaaaatgaaaaaaaagggtcaaaaactgttgctggcagctgcgtcctgaaaacaacattcactaacagaggatctgagggttgccttgacggtgaaatggtagacactctagacttaaaatctcgtgctaattaaagagcgtggatgttttactgcaaacagaactgaatgtttgctgtacgattcaccagtagtcaccacgcttcatcgctgtggctgtgcagtgtaggacgtgcccgtcttttcgctggcataatcgatagcctgtgttagcctgtggtgtgacaagccagtgtggaggtaaaaaagtaccgggttgtttgggctttggacaccaacacgtgctctatgagcatcgtgctgttacttgcgtaggggccgtcggctgttacaccgaagagcaacggccaatctgtggcaggttgagttgacttaagcgagtgatttctaatccagctttctgtagcatggagtatttctgcagcaacctagcagggtcggtccatttccaacaccatgttgaagctatgtcatggcacaatcatcgatcttaataaaacgttactccctcagtctatagcctcattgtttattagtaaaaaaataatttataagtacatattttctatgcgtgttcttagtgactaaaaacaaatattgtaaaataaacttctttaaaaaattaaaattaagttctaaattttaaattttgacttataagtataaacataaacaaaacaatgaggcttctaatgtggaatggtaggttgctatattttgaaatggagggaatataacctaaataaatattattatatcatgtttttgctataaactttgtgcttttaaatcatcaaaaaacattcaaattcattgcgtggttttcatggtttgccgggtgacaaggcaacttgggctgcatccctactccttagcttaaatagccattgaaaatgcatttcaaagcttcaaaaacaaaaagataacaaagataaaattgtgccctacggttggaaaaaattctggctccaccatggctggaggtggatccacccatgctatggcaaaatacgcttcccacattcaaaacggatgcaagtgagacagggttgcgatttgcatatacaccgtacaagtttttccttgttttagtacggagtagaaaataaactagcatgcagggtttttgatgtgggataatgtgctgctcgcttgcatccctagctactcaaaacaattgattaggccataaatcagtacacggactgatcaaatattatagattatgaagttagatagcttagaaagaagttatctgtagcgcccgttccgtcgtggcgcctacgggaaaattatctcttaaaaaccctaattgcgaaatttatttctttgcttgttgtctagtgtccatgccatctcaagatctcaaatccccgatctatcgtcgagttcaattccgaatccaaaaccttccaaatcaaatccctccgcaaaagtctattttgcctcccccggggtcgatgggctgaattttctctcggcccat

SEQ ID NO: 51718 - DNA, 1711 bp, Oryza sativa
ttcaaatacatataactgaatattgaccgccaaaataaaatcactacttgacaaaatttagatataaatcaaatactttgaaaacagatacagtattgaaagaaaaaaaatacaagcactagaataggtaagcccttgcccttcagaataaaatgtatgtagtactgcagtacagtaaaacaggagctgaaattgttgtacaaaaaaaatcaagactgagtgactgacaactaaatgcaaaaagggcaattactaccttctttgatttttataaggcttattctaattttaaagagtcctcaagattaaattttgaccgttgttttctcataaaatatattctaggtatccataaaaaatattgagcaaaagagctttgaaatgtgtctatattggcttttacactaaatgtacttgtaacttgataaatccttgatcaaaatcaacaaacttgagttttgaaataaaaatacaccttataaaaatcaacagaggggatgaaagtaagagctgttcaaactgtttacacaattggagacacaaaaaagaacattgagattaattgtttatactcacacagcattttgaatgtcatataggcgaattgattcatcatcacatgctgtcacgaggtaatttgtagccttgctgtggaaatccatagaactgattcttccattctgaaatacaaataagccccataagaagaatgaaatggccagtgcagagaatattttaactaagtcagtagatactaggcaacattctaatgtaaagtgaaatatgtacaaatggttcatcaaagaatatgtactgaatatacattaattttcagagtacacattgagattgctaattgacatcccgaccaacatacccgcaaggaattattgaagaaagagcagccaagaaactgacaggtgtgattgtacatgatgggtgaaaggcccgaattaaacaacagtagcatgctctacagttagactagatgaatttctttgttcttcacattctctgtttagtttcactcacactttatgaattgctaatatctcacgatatgaaatgtaaatatattaagtacaccaagagataaactgatatcttttcgattggttaacattgtttacaggacttattacatgcaaaaaaagtttccagtccaagctaccacttagctgtcagggttgatctacttagccctctgactgcgaaagtgtctagataaccccatgaactatctaataccatctaaataaacccgataaggttttacacatgccttttgccaccatagcagctaatgtgtcaatgcttcaacaaatctatactccatttgaaagatgcgatggtggttgtggcaatgaatctgccaccacacctcttcatattgcagcaatgttattgggttgccacataaataatcaaggcgagcactacatatagtaaaaaacaaattaatgttgtttatttcaggaaataatattatgtaacattttgttttatccctaaaaagctaggatttagctagtaagttgtaatcaaattctaaagctgctatatcagagagaaaaggggtgaatagaaaagtaggaaagagaaggcaaatgaaagaaaaaaaaaagagagaattgtttcagttccgtggtgttccacgtaagcaccttagggggttatttagtttttttttctaattcaggatttcaggggt

SEQ ID NO: 51719 - DNA, 685 bp, Oryza sativa
aacaaaggtgtaacaaccgaaaagaacacaaaagatgattggcttatatcagatcaagtgaagcttccgctgctttttatgttccaaagatcgcttgcttccaacagaacagacattgtccaacttctgaagcacgttttcagagttcaggtctactcctactactgatctactacaagactataaagccggagatgcagcattgcatgtcatttggctgtgattattaagataatacagcacgggagatctatgtattagttctgcaaacttcaaacaatgaatccacttggctaggtaaggtaacaaagaaaattacagtagaaaacaatatgcaacatgagcagcataagatctactcctacataaccggttaaaataaaactagccagtagctgcagaaacaaaggaacagctaatatggccagaagaagtagggccaaatcatttggtccttagcgcctttgtggcccatggaaagctgacacaaaaacatttagattccgcacatcacagtgcatcggtccgagtgaagcaaattgctgcgaaatttgttttcacatgcaaattttgtgacattgctccttggcaagattatgtggggttcccctgacgctgatggatatctacgcaacccatgcatcacgaatcagagtataggagacacctggtaaattggtgatgc

SEQ ID NO: 51720 - DNA, 2283 bp, Oryza sativa
cacaggcacactgctagtactgcgactgagccacctccgtactccgtcgtacatacactacactactccctccgtctaaaaaaaagacaaactctgagttttcgtgtgcaattttgaccgtccgtcttatataattttttttataattcgtattttcattgttgttagatgataaaacatgattaatattttatgcgtgacttgtctttttaatttttttcataattttttcaaataagacggacggtcgttgggcatggaaagcagagtttgtcttttttttttggacggagggagtgagtttgtcttttttttttttttgacggagggagtagtttctggagaccgtagagcggagagtattcgtctgcataaaccgtagtagtttcatggagtacttgagggtgtgtttagttggggaaaaggaaatttttggtgtcacatcgaacgtttgaccggatgtcagaaggggttttcggacacgaatgaaaaaactaatttcagaactcacctggaaaccgcgagacgaattttttgagactaattaagccggtattagcacatgtgggttactgtagcacttatggctaatcacggactaattagacttaaaagattcgtctcacgatttcccccataactgtgtaattagtttttctttttatctatatttaatgcttcatgcatgtgtccaaagattcgatgtgatgtttttgaaaaaaaaattttgggaactaaacgggccctaaattgaacagcgcggtaggcagcccatttgtcccgtaaactcggcgatgtaacaaaaatgaggctctcatagggaatacatccaatcacacaacctttccatgtacaccaactagcaaatgtcacaaaaaattctataaaaaattatacatttacacctaatagaattactccaaagtcttatatttaaattcattatattttagctatataaaaaacgaaaatctgacaattttatcttttttcaggctaaaatataatgaatttaaaaacaagatttcacacgtaggtgtaatattattggaaatatgtgcctaatttttctaaaatttaatatgatatttgttagttggtgtataggatatattcctctgatatattgccataactagctagatatagatcaaggagcaagtctagggcacgcttttggataaaattgagtagcagatgcacggtaagcggccaaggaggctgttgcctgttgagacatgacaaattagtgaaaactcaaggctatctaagctgttgcctacttgcctgtaaaattagtgacgtgaatgaaaactcaaggctggttcaaattacagggaaaattagcaaatttcacgaaccaaaggaaaacgtcgaaataggtgaaacagtggaacttcatcttcgtaataagtagctcttcacggttttcctgcagagaagatatggttcaaatgaatccagtgacagtaagttataaaaacacctgaaatgagaccttcagaacacctaaacagtatcattcgtaatgtcgtgtttaccatctctgacacgtctcagtgacacaaaataagagaggcctacagtttttatgtttactataggtttcaagcgatcaaagaaagcacatgagaatatagagttggtgattcttgatgttttatattgtttttttttacgtaatgttttatattgtctaaaacagattgcaagtgagagtgtaacatactactaacatgctactccatccttcccctaaaataagggattttgacattttacttgcattgtttgacaattcatctgcaaatataaaaaacgaaaagttgtgcttaaagtactttggataataaagtaagtcacaaataaaataaataataattctaatttttttttaataagacgaatggtcaaacagtgcaagcaaaatgtcaaaatcccttatattaggggacgaagggagtaacatattaaggatgaaagcaagtacttgcatgtttggaagatcagggaaagaaatagcatgaggactatactattgggtgaaggatattaagaaatcatacatggataacaataatggaattgtcgcaagttcagacaaaagaataaagaacactgtcctggagagtgcatccactctacaaaaaatgcataactatacgcacaaaaaaaggtggccaaatggttttattgaattgtaaatgttcaactctgttatctgttattgaaatgtcatatacatcctttttttccttttgaaaggagtaatggtcctaacaa

SEQ ID NO: 51721 - DNA, 669 bp, Oryza sativa
gatgtggagtttatggaaactatgtcagtgtgttgtgttgggaatggcctaatatgcttaagataacactatatcagtaacccctgtttgctatagctagaaggtcacctggtcacatgatatatatcccttcttttttatagttggtatccactgcaataattattgctataaaccttgcaccacattgcgccacatcatcgtttattgtcagctgttggattcttgaccatgtctctagatcaatggtatctgtcctcacacttacaactgcttgctctggcctgttaaaaatctcctcatctcatgaaagccaggaagcggtgcccttcgaccttctcaactaacaatcccctaattcctgtcaaaaaaaaaaaacaatcccctaattaacaggcgtcacatgcggaaccccctccaacgccgctatacaagcagtcgggttgttccatcttgctcgagcaaaggttagctgaatgaccctcaaacaaaaaaaaaaaagaaaaataaaaggctagctgaatgaccctcaaacaaaaacaaaaatcaaaagaaaaggttagctgaatgggcactgcacattcttggtcagctatgcaaattgggatgtgctctttttaactagaaatcaatcttatcctttctgctcaaatgcctatggcctgttgc

SEQ ID NO: 51722 - DNA, 2193 bp, Oryza sativa
ggtgttgacggccaggggtgcggccaaccgcgtcggcgtcgccatcgacgtcaagggcggcacatgcaccgtggcggcggctgcattcctcctcatctcgcgtttgccgtcggtggtacggagccccgctcacccacgggtcccctgcaggggcggggacggggggatatttcccacccgatcacctgtgcggggccggggttggggggagaagtcggggagcgggtgcgggggcgttccagcccaaccgccccctgacccgcccggttgacaaccctaggtaggaggtaacgctttttcaatttattcctcaactcctaatagctgttgtaccaatggaaaaaaacaccttttcccattgcaatgcacgggcatcttttcaattgagaaaaaaaagccaagtttccgttgtctgtaaaaaaagagaaaaaacctaactcaaaagcaagaaaacgccatttataaaaaaacctgttcgaaaaaatctgtcgactcaacacgaggaaaagaagtcttttataaaaatacaggttcaaaaaaacgtccaactcaacatgagataaaatccattgtgtataaaaaaatggattgaaaaaaccgtccgaatccacgcgaaaaaaagataaaaaaaaccatccaactccatacgagaaaaaatcatcgtttataaaaaaaatcgctcggaaaaaactgtctaacccaatgcattaaaaacctcatgtttataaaaaaaaatccggtttagcactgtgcaatgtgaaaaaaaacatctaccttatctacctcatcggtttcaggaaaaaaacatccaattccatgaaaaagaatttaatcttttgtatcatctacctcatcggtttggtttttccaaagcgttcctggaatgttctgatgtgtggatctaaaacaagtcttgcttgggccttttttttctcgaagcgagatcaaattgatcgaggcttgggtcagataggatcatcgattttttccatctcctagacggcttgtgttccacgatctattctcgtgtattgaaggcacttcatatctctgtatggaattatcagactactttgttaagtatagctaatatttttgatagcatatcatataaaaataatacatatattaacagaagagttcacagtggctctgttttgtctagaattgaccatgtgaccatgtgagacagtataggatttgattaatcctattattagttgcaagaatgaaattgaaaaagagtttttcagattatatgtgtacagccacacaaataatccaattcttttgggtaaatgagacaaacttcctccgttttataatgtaagactttctagcattacccatattaatttagatgtaaattaatctaaatatatgcatgtgtttagattcattaacatcaatatgtatgtgagcaatgctagaaagtcttacattgtgaaacggagggagtaggtaattatgtcgtcgccgaggttggggtattacaatattgaagatgttccaattttccttatgacatgtctgttgtcgaatagacaacagcgtcacaccgaaaggcgtggttctctaaacagttgttggaaaagtaaggcaattgtattgcttagtaaaaatttttttggggatcccccattacatggcctagaagggctatttataaccttattacaggttctctccccttagggtttaggctttacaggagaatttacatggttacccttatgatagggagatgattaggggtacacagtgtcctttacacgtatggccccaattgggctaaatggctcggccaattgatcttggcgaatccccacagggtcgcaacagcccgctgggcttcctcacagtggggtatggtaccttggcgaaacccatgccttcgggctgaagcttttcgcctcaccatcttcgcctgcgtggcctcctgacggggtccctgtccgacgaagcacgcgtacttcccgagccatggctttcgcccttatggtatccctcttcgaccttcgccgcttgcttccggtttgaacatgtcgcccaagttttcggtttcggcaggcccggccgaaggcctttcgcagtatacctccaacaagcccctcacgagcaagggtgagtagggagcttcggccgagaccgtgcaaatcgtatggtataccgcgaggcgccccctttcggtcg

SEQ ID NO: 51723 - DNA, 1276 bp, Oryza sativa
ccatgtgacatacgcattggacatatacatatattaaaatctccacttaaatctttcttttttttatcacttgttagctctgactaacaaacaactaccaatacaataatcacatggtatcactgtacaagtataaattgatgacttacattgatgatatgcaaatatgttatgttggttattgaaagttgttcgtttaagcttctaaaatatgcaaaaccaccatccaaaaccacttcagggggcaatatatatgaacggttttacaaagtttaaggggttagatatccggctttaaagtttggggtgctagatgaactttcatccaaattttagttgggtatttggacattttcctttcaaaaggttgcattttgtttttttacaacactttgatcaacattattctattataatataaatttttgaagcaaaattgatgttattagatacgcctccaaaagtactttcatgtgaatattcttatgtgccacataaataatatactagggaaggtaaaaactatattaaaaattacgccctacatttcaaactagagggagtaggtaccatagtattttttttaagtgtttttaccactcgttcacattaaattcattgttttcacctaggcctaccacttggccatgacatttttgcccctcaacacccgaggttaaataagcacttcttttctccagccaattccctaaaaatgcgctaaacccctttctctctcctatatgatcacaaaaggagccattttattgcgccacgttacaaaagactgtagtagctagtcaaacatatattaagcagaagcaggggcggatccaggaacaaaaaattgggggactcaattacacaatttcttcaacctctagccatatagagacctttagtttatcatttatagtgaaaaaatcgaagggggtgctccgggggtacccacgttggatccgcccctaagcagaagattaaaaacctatgtcaaaggcggcgggcattgcgcgatagatcagagtcaagtgaaccaagtgttcacagtgatggggtttatggctgcgatcctattgcttccccgctaaaaaactcaaataactcttattttctaggtttggacctcctgtaggataacaaccctactcttagtctttttatagatcgggtggtgattgtatacacctgagagtttgacgatgattttttctaaccacccattttggagaacccccgatccattatgtaatactaatggggacaagggctgcaggaa

SEQ ID NO: 51724 - DNA, 760 bp, Oryza sativa
atcgaagcgtttttcatattgcttttagttttctcttagtttgtccatctttgtcggtttgcgccgtaaaccgtccgccgccgctgcgagagtgcaacacctctttgtaagtttgttctgaaaaccttccgttttgcccacgagacgggtagttatctagaaatcggctccgctagccggtttagttatcaaaacccatctaggtttagctctttgctagatcaaggtggttggcaactctaggatcaccgcaaggcataaggtgctgcgatcgtacttgccaacttgtcacaaaaagttgccaacacgatttttggcgactctaggatcaccgcaaggcataaggtgctgcgatcgtgcttgccaacttgtcacaaaaagttgccaacacatagtatagatacattctagttaactgacatattagctaataccctctatccgatgccctcctggtacttcgagaagccacccctgactgtcgagttccttacgacagcccatcatgaccatacaaccggggctaaatacggaggaataccctccccagggaattaacttaggattatataccggcgcggaggaatacccgtactgagctgtcaccatcagtggcccacctctcatccgcaatatataaccccaaataatgatatcccgtaatctagacatcatgtctaaactaccagatactactctaatatcatcgtcatgacataaagtaattgcatatgcaaacattatacccgcaccaaagcat

SEQ ID NO: 51725 - DNA, 734 bp, Oryza sativa
tcattgctcaatgctacaccacgttgagacaggcccaaaccaccacctgaactaactagttccattagttaactaggggtgagactaattacggtgaatctggtcgaccgcccataaccgcgggcatgactattcgaatagttttactctgatcagaggtgtacaactgtatccacaagacacagccccacgacacgtttccgtgcactgacatgccaccacgacataccgaaaagaggccgtgacaggacccttcgcataaccccctctaaccgatcgcaccacaccttagggttcgcccccgtccccagcgggcaacgggcagcccccctttcgtgccgcggtgaatccggaagccgatcaaccggacaccccggccgacccaactccatcacgcccaccctcgcctgggtacgtcggctagagggaagctacactacaagcccaatcgttgcccacgctggcttgtggtaagcacgataaattcttccagggtttccagcgaaccggtccttaatcaccatgggcacaactagcaaaaccatgcacccacagcccaccatgtagtgtactttaattaactaacaccattgcggtggcactaatccaaagctatgccaataatcaaagtccatgcattaatgtgattcccctttgtgtactagttgaactaagcatggctaagcgttccctaaaccaacatctaatcattttgatacccaagttatcgatgg

SEQ ID NO: 51726 - DNA, 1033 bp, Oryza sativa
catgaaggactcaagtcaaaacatgttttatgcaagttggcatgctttcactggggtggcatttttgtcataggttataaataaaaaatgttttaatttgccctcaaatttttattcatgcaagaattagatcaacttcaactaggtttaaaatggaaaattttggtccacaaaaatggaaaagttagcttccaactattttgacatgaaatttttaaggtctagaatttgagtatgttacaagagtgcaagtagcgagacgagcgcggcatgcagagtcgcggtcacggtggagacgaagcgttgatggcgccgttaccgaggagtcgcacacatgtgtgcctatagatagactccctaatttcctgaaaatcctaaattggacagtcgggcttctcacttatgggccaattatgaataaaatgtggtggtaagcggcccaaggagaatatgaggggttggggcgacgcatgccatagctgggccgatcgccccatgccgctcaatgggtacgtccgcccctgagtcacctaccaagtaagcacggactagggcgtcccggctcagcacccatgcgtgattacgataagggaacaatgtctattgtggcgtgagcatcgcatcaagcaaaccaatcctccaagtccaccattcttttgtgagggcatcaactacttcactctttattcaactgcctcgaacaccatgcatttctctcttcccaaatcatctagtataacataggaaaggccgtgtcgaagaccttcccttgcttgtctaggcccacgcgtacatccaagcacctgaacacgcaaagatgtagcctagagggggggggtgtgaaatggtcaaataggcctagaggggtgatgaataggctaatttaaaactttatgcggaagctaaaactgagttagggtcagaaagtttgatccacagtcagctatccgaaaatatcagatagtctgatgttggatcagactgtctgatccactaaagaaacacaagtagatctagtgcacaagggctgcag

SEQ ID NO: 51727 - DNA, 748 bp, Oryza sativa
actgcttcgtattcctgcagcccataactccgtctctcaccatcatggctgtgaccatagatagtttcaccataaccggggaaccccgtgtgtatcggtttcatttgcttttcttactccgaaagcctatacaatatgtgtccttttctggataaggtgttggattttttttccgctgttgttagtactctttcaaaatattaaaacggggtgtttcgtgtaaaaaaactttaaatatataagtggctttaaattatcaagtaaatccaaaattttaaatttagagcaattaaaacttgattagttatgtgctaataacaagctcgttttgtgtgcactaatttttaaccttcatctacagcccacaaggcactgaacatctctacagccttcatctacaaccttcaaacagggccaaggtatgaaaactatgctcccaaatctctacagcccacaaggtactgaacatcgaagtcaaattaaccgcccacaaaacatacaagtcatttattcgtgtgctgcacaaagtaatacactcagtgtgtatggtggaaaataacgtctaaaatctcatttgtttagagatacatatatgtgcgggcgtgccaatgtacctaaattcacaatgtaaacaaaacgtagagaacatgctctctatgaatctgaaaagatcataaatactaattcccaatgtaatatatatgtatgcgcgctccataatctgtcattggacatatctgactcgtgc

SEQ ID NO: 51728 - DNA, 719 bp, Oryza sativa
aacaagtagaattttggaagggattgattaaagaaattgaaggacttctacggtacaatacactagcaatatatatttttggcatatacaaagatacactaggaatttccatgtacaagttcgcgtgagcatggtggagagtggggagttgggcatcattgctgctgcctcctccaggtagaggaactagctagggttttgggtgggtcggaaattgagaagacgaaagaaaggcaattcgaattaatttacaggcaggcaggcacaatagcgtggtgcgcgtgaacttgcagtgcgtgtggcgtctctctatggcggtatggcctatgatggacgacaactacgggactggggaatgaaatcaagtgaggaacacgtctagcattgtgcatttatgtacaacagttgtctgcaagcaaacatttagaaagacaattatccccttttcaattttatactacaattaatttaagttggtaggccagttaatctacaccatctgatcattcatactaataaaatgtactgtttgtattgatccatatgttatgaaacgaatgtagtatcgtatatagatcttctcagaaatttatgtcttctctctgttccaaactctccaaaattactgtaagaaccccacgttgaaaacagggcctttaatctcactaatcatgctctcttaagcagcgcaactccaacatctgatcaaaaactaacac

SEQ ID NO: 51729 - DNA, 643 bp, Oryza sativa
agataacgtgtgtttagtacgcccttcccttcaagcgagccacttcatatatctttagcagctaagcaaagagaattaatcaattactaattaataatcgatcaaattagcaaagttggctacgaaatagcaaaaggatcggcatctgacgaggaatttcgatgggtgagatacctctgcgcccgaatcgttcaccggatattctctacaagcttcagttccatcagttttgtggggacgttttggcagttcggtgcgtgctggctgaaccgcccgtgtaggctccagcagagccacaggcacacggggccactctgcccgagcgccgtaccgcgacgcgcgcggcaggtgcgccgtgcgcgagccccacgcccccacctccgcgcgtggtggcgcacaccgactgcgacgacgagcaccaagtccaaacatgcgttacgcgtgtgccggtggtgcgggtagctgggctcccggtgttttgttttgtttattttttcatttcacggccgctgcgccgtcctgctctggtcgcgacgcgcgcctgcgcgcgagggcggtccgctcacacaacggctcgtacgcggctgtgtggcgcacgggcgcgtggtggagtggaacggtgggaaggtgcgcgacgtttcgc

SEQ ID NO: 51730 - DNA, 2889 bp, Oryza sativa
catagccacatgcttgaatgggccttgccaacatgacagaaatggcccatgggctcattcacgcacgcgcgcacggacatctaccacggcgcatcaagacgggctacgccattgatgacgtcagcgagcgatctcccttccgaccctacctaccggaggagaagcagcagcggtactactacggagtactttaatttccgggttttcggacagctcaaaagtagcgaagtacccgttaattaaacatggtccattctccccctaattctacagtattattatatatttgaattaggtgcacagtctggatcatagatgatttttataattataattgtgtttctgtgtgctaaaggaggggcagaaacagattgttttcttttttggatatatggagcggaaagggaggattcctggttatttcctctgtccagtaaaagagggtgcaagcaaatatggttttcttttgatacctagttgcaataatcagttagaaaaagaatcaactataggattccttcaacctaaaatatagatacttgtagcgcttggattttgttccaaaatacgtactcctcacgtcaaccaatcacaaccatctctcacttaaattcttaacatattttctcatcccaattaatcataaatatcgctcatttaatttcgaccatctccgtaagtcagtttgagataactgaaattgatggatggatagattatttgattttttttaatagctatttaagagtataaatgaatgagttaactcctacaaagtaaaaaaaagttattctagaaaagtattccaagaaaaaaaatataaagattttctttatgaaatgcatttagaagcttgggaaatgtacagatgaaaatccaaaatattgacttagaaaagaaagtggccttgatctctgcgaaaaactttagaaatacttgtattttgggatgtaacacaactttagaaagtggttttttctagtagttttggttttcctaggactaaatatccactcgattatgaaaattgtgaaaagtaaagtggacataaagagagagtttaattactgtttaggttcaaaatttggaatgaaaaaacaatgagggacaattctggaaattttgatttttttaaaaaaataaatttaagcaattatcttttgctaagtttgaacaaatagtttgctaaattgagacaaatacagcattttctggctaactacatataacacatcataccggtcccagccggtaaacccgaaatttcagaaactcagtgcagcaagatcagtgaccgagacaattagctccaatcattgagagacccaggtcatgcacttgtaaaccagcttaacgctcaccaaatgatgtcaattaagccagcaaggaccttaaattggctccaacctaaaccgcagagacagtggctcaagaacacccaagagaaagactgaaagagacgagcaccaagacggaagaggatgacaaagagcccaattattgggacacttaggtggacggtatgaatccaagggaactagtagacttgaagatatgtattcatgtcagcgtcggaatggatggccgtccccttcaaattcgatgcacattgtggtagtgaacggggtaacgatcatcatggggccctatattttgatgggatgttaattcctcgtgaatttatagcttgttatggtttacctggtgagtggtgaattggaattttattttagtggtgaattggaattttattttgcaggtttagcttgttgatcgcttaggatcagtgacagatccaagatttttttgagcctgaatttctataacgactgtttgatgagaaaatgtcatattcaatttatacagaaattattattgattgttccctcacgagaccgggtagccatccaaaatcgtggggcggtaattcctcccctatatatgtttcactacgattctctcgtcaatattataattctatcatcaattttatgggattaaatttagtttttttaacctgtgtatacatttgcccttgtcatgtgcaatgttgtgatccattaagatcatatcaatccttgtcaggaatcacgttgcagtgtccctatgatcccttgtcccttcgttgctgtgctatgagaaagagagttgccatctcgcaaagaccatcgtcttacctcagttctgaaaggaggtgcggatccaaatcagcttttgtaactgagaaaaagttcatcaacgatcaatttgtccttagttttgccttagacagcattagggtaactggacctaccgcggtacactccaagaatccatccaatgtttcgtaagggtgtgtatatatattccatggaaaacctagactttgcttcaaacaaaactatatccaattatcatagagtctgcagctcaatccatccatcttttgcaatggataataatatatattacctctgtcctaaaatgtaataatctaagatgggtttaggtctaataacatcctagactacgtatcttattctagattgctacatttttttgacagatggagtacatggtataaacccaaaacaccgatttaccataataatgtatttttggaattcagggatgattttacaaggatttcatcagaattagtttgttttccgaaggaatcaggggagaaatactcaccattcaagattttgagatgaaggtattttctgtatttcataaagaaaaagaatgccagatcagaaatcatgcctagagcatcgggcgagagagagagagagagagagagagatcatacctagaggtacgggtgtgtctagggcggcgaaatttcgccatgccgaccatgccatctgcacccatgttgaaccatgatcatgtgcgccacatccc

SEQ ID NO: 51731 - DNA, 1040 bp, Oryza sativa
tgtagatgatacaattgcctgggccgacggaacattggacttaccctttcactggagatcgaacaccgatgcagccccgcgtcaggtgccaagtcccgccggacgataaaataaagtagaaaaggtaaaaggtggcgatgcgccgaattgtattgattgtgaggatagattacaatgaccccaggtgtacatatttatacccatgggttgatacaagttcttgtcggacaagaaagaaaccttcctaaagataaaaggaaaatataaagttcttataggacacgaaacacactttcctagagataaaaggaaactaacaaactattcctatttaatagataacttgacatgccgcattctctttaaactcggtcacttatggataagcttctattagtagattgatttccttagccgaatataacaggaatccgactattggcgacttgataactcccatcggctgatcccgagatgctgcagccgataatgactctaagccgatgacgtctttgccgattaccaaatttcatcgttcgaatgttttttcttattttattagtagtcttatagtagtcttagattttacattttgatgagcctcgttttaaagaattcagattataagacttttctactattgcccacattcatatagatgttaataaatctaggcacacatatatgtctagactcattagcatatatatgaatgcaggcagtgctagaaagccttataatatactccctccgtcccaatatattaaaacataggacatgatgggacattttctagtactacaaatctggacagactgtctgtccatccagattcgtagtacttaaaaaatgtctcatactatcctaggttttaatatattgggacggaggaagtataagtatgtcaaacgttgggctggtgtctttggaaaccgaggatctcaaattctcaatccgcgcgcggtcccgcgggtagagacaagcaaaggaggagaaccagcgccacgccaacgacgaccggtcgatgcatgcccggatgc

SEQ ID NO: 51732 - DNA, 3609 bp, Oryza sativa
cgagatctttaactatcgataacttagaaaatatactaattagatcaacatagatttgtcttacaaaatactataataaaaataaaaatatttctatttagttatatattataataaaaaacatagttaaagtatactccatccgtcccaaaataaaccaactcgtactagaatgtgcaacaaatcgatatagagtatgtttaaatttgttgtactactagattgatttattttaaaataattgtaatactccctccgggctgggtttattagtcgttttggctcggttagctgtggatgagaaaatttgtcgttggagcatttttcccacgcatgagacgagattgcccttgtgcattgatggcgttattgttcccagataaccttcttgttactccttttaacgcttcgtttccatctcatttaattttcgcatgccctcgcgcgctatctgtactgaagctgcatgggctacactcatgcatggtgccatgcaaaattgccaagacaaaaaaaaaggtatgtatctagagcagaaatcgaactcaggtcccaagacaccaatatgaatgcactaaaccaactgagagagtagttgttggttgtttgcatgctacacctaaccgtttttaatagggataaaataggaaataagaaccatacttaatgacttcttggtttttgaaatcctgtccgaaacgactaataaacccagcccggagggagtatttttgtagatcatgtccgaagaaactagcttctcatactcatagaactacacaggtccgaacaaacctctctgaactgttgacgaccgaccaagtacacgcaatgacaccaaaaaaaaaatttatcaatggcctgtttcgtttggcccagaagtacacaaccgcgcgcgatgattgaccggccggctgcatatcgctgccgacgtcaacgtcgcgagctaagctaataagctagtagccaccacacgcactatcacaaaatatgtgatgcattgtgtacatttgcagactaaaattgcctacgtctctaaaataacaccagaaactcgtggaatatataacaacatagtccatatatctgtgataactagctttcttggttgaggccgaattaatcctctcttgaccaatcatcacggacgcgtacatatatagaagaatcatacttgtacacgatatatattggacacagacgcatgcctgtaaccaccgttctgatggacgctgctagctaacctatacccgtgtctgtgtgatgaacgttaaccccgtatgtaatcaacgattctggctgtgttctttgctcagtgttatcaactcatcttcctcatgttacacgcgtacgcttttcaacatgctaaacagtatgttgttttaaaaaatatttctatacaaaagttgtttaaaaaatcatattaattttttttaaaaaatagttaatagtacttaattaatcaaatgctattaatgaatcttttcgttttctatgcgcaggagaaacgaacccagccactgtgtgtggtggagccgtacgtggatcggtggatggatcgggctgaggcggtgtgtgtgggcgtgcgtacgttgcgtcgcgcgatccggcgtacgtttctgcggggggccgtggaaagaggcgcgcaccgcgggacggtgccgggagggcgcggcgcgcgggcgggcacggagcaccacggttgggctccgcgccgtccgcgcgcggggaagtatattaaccaggcatacggcggttgttgcttgcggctgccgcgagctaacttgggcgaagttgcatgggtgggctgaacgagacagagatagatagggagagagctagctaggaacattcctgtgcatgcacgtctctctctctctctctctggttgagacctggccggcctcgatcctagtagtagacaaaccagcaacgagttgtacatgcatgcatgtgtgtactttgtatatagacgacatgatcaatacatgggggtatgaaacgatcgagtaacatgcaggataccatgtattgtcgtactaggtcatagtaatgccataaattaagttatgtgtctttgctactttgagatagatttcgttgcagcgacattttttttccgggggtgaggatatgccacaattgtccacatcttctttctcttctcccccctttaacatcggacatctctccattactagctttcactacgattgtcggcatccatatcctttcgtgtccccttccttttccacacctgcacccagtggcgaagccagaatttagggatagggggtgctggcacgagacgtaagaactcaccaacgtctcggtagacaatggtatggatcttggtgctcagatcctgcagagtggcagattggcctcacccagttgccttttgttcgctctaatatgcgtagtcacccctcgtataattatatttagaattttgtggttatttgtcgtttgcactaatatatacataaaatgattgttgatatgattttggatatatttcagcacattcttctagatttatatataaaattgaacttattatagaatggagcatgtatgttccgagtccgaatttactttaatatagcataacaagaaccatttttaaactatgtcactaaatagcaccaactttactcaatacttgaatgacacgatcgacatcatttctatttattctttttagttttggagacttgcaaccatatcgcttagttacgttaattaactcaggtgaacagctagatatatgctcaacttgcaactaattaatgagctaattgtatagattagatggctaatcacccggggtttgcatgtagcgcatggggatgggggtggcttcgccactgcttgcaccaccaaactcaccgctagccgctccttcacccttgcacggtgaacatgcgtggttttgcatacactatccctcaagttactgactccacgtctctcgcctcctgataatcggtgatgtgcttcccaggtgtggccgtttatgggctatactccttccatatatatagccattcgttgtgcgcctctcgggtctttcctacctcttgcatgaggaggagctccacacttgcattgcctcgagggatgatgttaggtgtgcgagtgtgacataggcgacagaagtcgtcgtgtttcagtggtgaattcgggcgctgtgctggtcaaagttgggcgagatggtggcaggagttggacgttgaggcaaggtgagaggaggaatattagtaagaaaagaaaacatgagtgattttggtacatggcattcagagtaaaagagagttatccccctaaagtttgtggtatttcttcacaaaatgaacaaacttcatggcaaatgagcaattttccattgtttaaaatatgcgaaaattccaacaaattaaaattaaagtagatgcaacaaacacttcaaaaaggagaagacaacacaaatataactgtgtgcatgtttgattgttactacggtatatctacttgattataggaaaaaaatacttttataaataaacataacaaaaaatttaaacaagtgaatctaagatatataatagaaatcaatacaatataaga

SEQ ID NO: 51733 - DNA, 1393 bp, Oryza sativa
atctataatccgattacaccattgtgttcgttgtaattaaatcttcaaaacaagatcttacatgattatactacaatgaaaaaatatttatgtattgccatgtttgataaccagaagcggtttggtacaattaaattcttgcgtggataccaagttttaatcatacatcccagtggcaaaaatactactcttatgcatatatatacctatagttctcaatggaatgaagaaagttgcaataactactttgtgatccaaattcatgaactgtgcataaaactgctctctttttcgttgtttcttgatttgatatgtgacaaatatttggtggtgagtagaagcctgcctctttcgtcgattaattgcacgtacgtcccatggaaaatattggtataaaaacgacattgcaatgatggttaatatatttgatacttgttgtataagagttattatatatataatataatcatgcaatggctcaaatgtaaatagatgttgcagtaagtcaataactactaatgttaataacgtgttccatttgcacagtgagcgtaactcaattagttagctaggttcctgttgatgcaaaatctggtgccacacacgaaggtcaagagatttccttagctctggtgcaagtcctaaattttgatgaggttcaggtgtgtcatttagtttgatcttgcaactaacaaggataatagaaaggattgaaccaataaaccaattggccgatactgatatagtgtgtatatatacatcggctaactaaccgatatatcttatagctaaagcccatagctagcaatggtaactcatcgactagaactccgataaaacgttgtataatagcctattgacttagtagaatcaaacttattagcagcaatctaatagatcggacctaaccgagataatataagattgaagataataagaaaaacctatttagctgatagatctacacaattgtgatggatatattgaaacaatctaaaacaacaatgtgattagagaaataccaagatagtcagaatatcggacctaaccgaggaagtcctaattaatccaatacaactctaaacaacgatgcagttaaagatagagtcgatatatctgataggcaatgcttgcatcaacttgaatagaatattggacataaccgagaaagttctagccaaattgatacaagcgaagttgacggaacttactttcctcactggagattgaaacgatgaagcccaacttgagagcaaggccctgaacttggtttctcaccgaagatgaacttaatcgatgcagccccgcccaaaaacaagaacccgtcgaaaggttgccggttccgaaatataattgtattgatctgtggatgatattaaaacagggctgcagg

SEQ ID NO: 51734 - DNA, 959 bp, Oryza sativa
tcctgcacatgcctgtctatggattccagcttcccttttgcttttcaatcacactaacaatgcaacagcaatcctttcttttttgttactacaaaatttttgattggttggtccaactccagtgcaacaccttgcagcttatgttgctgttaggcaggtcagatgcgtgaacattcttcctagggtggtgtatcactgtatcctacagcctttgtccctttttaacactggttgtatatagtaattagttgcctgtcatttgggataaacagtgcacactattaagtaatcagcacatcatcactgcataattattgccatctgatctgaagcttcaggggaaccatatccctgaatttcccaacagctgcagatttcaagtaggtactctagattaggatgctacatcctactacaccctagctacacaacctttgtccctcaactttggctctatggccctgtttagtacacactaaacttcccccaaacttccaactttccatcacatcagatcatatccaaaactttcctactcacataaactcctaactttttttttccaaactaccaactttccccaaacttctccccaattccaagaactaaacatagcctataatagagaggcagtggatcaagcctactccctccgtccctaaaaaaaggttaacatagtacaagatgtaacatttccgagtactatggatctggacagaggatggagtgagtaccattttgcataaacagtgaaaactaatcatcatattatcactgcatcattattgccatcttgtctgaaactctgaatcttcggggtggcaaccatatctgaatcctcccaacagctgcacatttcaagcaggtagatgaggatgcttcaccctccatgagtgaccacttgtcatacaaacacaaattgtagctatcaccattcatctcatatatatatatatata

SEQ ID NO: 51735 - DNA, 2593 bp, Oryza sativa
  unsure (1)..(2593): unsure at all n locations
acattcctaaataattaatctacacagacacaatccacatatgtgggattcaaaaaaaaaagggaaacaggtgcatatagctaccctaaaatcaaataaccagatttgggctaaaacacattctcttaaatcattaatctagcgaacacaatccgcatccgtgggattcacaaaaaaggaaaaaaaatgtatatagctacccacaaccaccttggggctaaaacacatactcctaaatcattaatctagcgaacacaatctgcatccgtgggattcacaaaaagggaaaaagtgcatccggtctacgggtatcacctgaggacgcgagaccttggggttaaaacacatactacttaattattaatctacgaaaacacaatccacatctatcggagttgcaaaaaaggaaaaaaaatgcatgtagctaccctgcaatcaaaagtcaccatggggctaaaacacatactactaaatcattaatcttcacgaacacaatccacatacagctacctacagccaccttgaggctgaaacacacactgcaggttatgtttggttcatggccatttctagccttgccaattttgggcaatggcaatgccatttttttttggcaaaaattggctagtgtttgtttggtttgctaccaaagttgcatcttgacatattcaactcagccaaataatttggcaaggcaaatttttggccataaaccaaacaaataataaaaattttgtcagtcccaattttttttttcggtttggctgagattggctacaaaccaaacatgcatatcccaatcaactagcacaatcagcatctaatgaacagattaaaagtagcacaagtgaacacaacattattactaccctctaatcaatcaaccattcataacaaactgaacaacaacaacaacaacaacaacacaaacggagaaagagagacaaaaaagggattaaagagacatcaccatccgctccagagattgcagggtgagaagcacacggaagaagctcctcccgaagcagttaatgtcgcactccttctccttccccttccccttacccttccccatccggccaccttgcttttccctaaccaccatgacctcctactccgattcttgggccccccccccccccccgaccgaacaaccaaagccgaaatagaatccaagaaaaaggaaggaagaaaagagagcgcaagctcgccccgcccggccgggtgaacaaaaagaaaaaaaaaatcaaaccggcgaggaagcgggtggcgggtcgggagagggaanacgagcagcaacggcggcggcggcggaggagnaggaaaagcaatggaagcgaaatgcctaccgctgtgctgcgatgcgaggggaagaggaaaataggaaacaagcgagcaaggagagagagagagagggttttggaagagagaggggggaggggagtgtcagcactggaaaagtggaaatttccagaagggcctgagatatcacctgcgcggcggggtgggacccacctgcagtcacacacacttccatctcttttttttccctcatttttttactttctattgctcgcgtccaatcaataactctctctccttcagtccaattctcgcactctgcttctctgttggccctgttcgtttccttctaaactgacaggataaacttttggattaaaatggcatgttttttaaactactaaacggtatattttgtgcggaaactttctatataaaaattgttctaaaatatcagattaaaccattttttaagtttgtaataattaaaactcaattaatcacacgttattgccacctcattttacgtgaaaaacttaatttttatcttcaggagattcaaacacaacttaatttttatctttaggagattcaaacactaccttgatagtacccacagccactttggagataaaaacacatactcctcattcgttgatctacacgaacacaatccacatctatgggattagaaaaaaaaggaaaaaattgcatatagcttccctgcaatcaaacaatcaccttggcgccaaaacacaatctcctaaatcattaatctaacaaacacaatccgcatccgtgggatacacaaaatgggaaaaagtgtagatagatacccataggcaccttagggctaaaacacatactcctaaatcattaatctttgcgaacacaatccgcatatgtgagttttacaaaaagggaaaaaaatatatagctacccaccgccaccttagggctaaaacacatactcctaaatcattaatcttcgcgaacacaatccgcatatgtgagtttcacaaaaaggggaaaaaaaacatatagctacccaccgccaccttagggctaaaacacatagggtatgtttggttcgtggccatttctagccttgccaattttgggcaatggcagtgctttttttttagcaaaaattgtctagtctttgtttggtttgctaccaaagttgcatcttgacatattgaactgagccaaataatttggcaaggcaacttttttttgccacaaaccaaacaaataacaaatattttggcagtcccaattttgtttgctt

SEQ ID NO: 51736 - DNA, 1352 bp, Oryza sativa
gacatatgtacgcgtctataaatattttcctttaagagggcacatttacgggcgcatgcaacacaagtagcaccaccacactcattccacatccgcgcacacacatagatcctttcacacacaagcgaggaggcattgcattttagggtgcacggacacatgcaacactaaccagacacattccaaatgcacgcacacacattgacatccttcacactcagaacgaggagagattgcttttcagggtgtatatgacacacgcaacaccaccagactcatcccacatgtgtgcgcacacatggacatccttttacacacgagcgaggagagattgcattgcagggtgcatgcgacacacacaacaccattaaactcattccacatgtataaacactactccctctgtcccaaaatataacaacttttagccctcaagatttgtcccaaaatataacaacttctccaccaacattctcttcccaaccaatcacagctctccaccgttcactttttccacctaactccactactcaaccaatcacaaccctccaccattcacttctacctactttcttaataatcgtgtctaactctaaaaatgcttataatctgggacggagggagtacatcttttttacacatgagcgaggagatattgaagggctaatgcccttagtgcactgaaatgcatagtaaattgaaacacaagtgtgtataattgtgcctaattggtggtaaccttaccaggaaataggaaaagactagtggtaaacataatgttgggaattgaacttgtgccaaccagctctcaccaccgagatccaaccactaagctatggcttagtcctcacatctacaaacattttattgtgatgattgcgaacatttgagttgaatgagagaaaatatggggcttgggggtgtttaaaattttgcatgatatggtgtggtgctattatgatgtttattgatactagcacaaaatgtttatgttttagttaaaaagatggcaaaatttgctacgagaccctcaaaatttgtgttatttgctgatagacagcataaaaacacgtcgcggctaaaagacactttaaaaaactagtaatttgccggaggacactttcggtggttcaattgaatagagagattctttaaaaagacaagaatgcccctagggtcaaaaagcttttgagctgagactagaacgaagatggaatataatgtatgctagtgatgtacttggggatgatggcaaaattatattgcataatttctaaatttttactctaacatcatgtttgaagcatgtggtcttaggggcattctcgtctttattaagaaattatcaattt

SEQ ID NO: 51737 - DNA, 1110 bp, Oryza sativa
agaatctgtaaggagagtaagggacacatagatttttgtataggtccggaccctctaattatgggtaataaccctatccctgttggccaagatcgctgttaccgctatatataaatgtctcgtgagtacaaaggggaggaaaactcacacatttatttgaaatgcatatctcatttttgcgtagctaactaacccattggaagatagcatctttattcctacacataaacagaaccagtttagaatccttctacaatccatacaagattctcctggatgcaataaatagccaccttgggggtaaaacacattcctaaatcatgaatcttcacgaacacaatccacatatgctggattcaaaaaaaggggaaaaagtgcatatagctacccagcaatcaaacaaccgccttgggactaaaacacatactccgaaatcattaatttagcgagcacaatccacatatgtgggattcacaaaaaagggggggaacacatagctacccatagccaccttggggataaaaacattcataaataattaatctacacggacacaatcacatgtgtgggattcacaaaaagggaaaaaagtgcatatagctaccctacaaccaaacaaccaccttggggctaaaacacatactcctaaatctagcgaacacaatccgcatccgtgtgattcacaaaataggaaaaatgcatatagctacccatagccacctcctaaatcattaatctagcgaacacaatccgcatccgtgggattcacgaaaaagggaaaagtgcagatagctacccatagccactttggggctaaaacacatactcctaaatcgttaatctacacgaacacaatccacatcaaaaagggaaaaagttgcatatcgctaccctgcaatcaaacagtcaccttggggctaaaacacattctcctaaatcattaatctagcgaacacaatccgcatccgtgggattcacaaaatgggaaaaagtgcatatactcctaaaacattaatcttcgcgaacacaatctgcatatgtaagtttcacaaaaggggaaaaaaaagcttatagcttatagattggtctcatttaaatttttatatccaa

SEQ ID NO: 51738 - DNA, 1143 bp, Oryza sativa
ccttatattatgggacggagggagtaggcccacagtaaatggtgccattgggggaacattctctaccgtccaggacatgagatgatcaacggcttagattgaactggtacagtagaatgagcaaagtacagctttgtctcacagcaacatgccagcatcaacaccctgttgctacagtaagaacgtactgtttgaattggtcagtgatttggatccttcgctgcgatgctagcagcaattgcaagcataaggaccccatatcgctagtttggtatttatcactacctttgtctttgtatcgttgtcagcaacttgtataggataaacagtattactctctccgtctcataaaaaatcaacctagcataagatgtgatgttttctagtacaattaatttgaacaaaagcatgtttcctcttttttaaaaaaatatacaaggctatttgacttttaaatatgagcatatatttgattactcatcttatcatgtctaaaagttaatagtgttatatattaaaagaatcatgctatacgtacgacccatccatccaaccggcgtacgaccaaaacaacgtagcaacacattgcgagacggcgtgaggattcgtactgcacgctgctgacggcgcgtacatcaacgttgtagtcatctgatagagtcggatgtgtgggtcgtgtgtgtagcattttccatattgaaaaaaggagggagtatctatcttccctctagtttatactacccctccatcttttatatgacatagagggtattatacaaatgtctatatgaatttaatttgtctaaaagataaagaattttaataaggtaaaacaccttcaatcataatttagatccaaactcttaattaactcttatgctgatcacctttcaaatttagtgcataactgttgtgaaaaaagagtttcattttttagaaccaaaaaaggaaggactgtacatgtatataagattcctcaaacagccagcatccaccaggactaattttccccgttcctgtcgatggctcaggacttctcttgacacgccttcccgtattttttgtccatatgtgtcggtgacatgggaccgggagtatcatgactagagccttgggcaggagcaatcacccacgtggcctgac

SEQ ID NO: 51739 - DNA, 741 bp, Oryza sativa
tcgggcgactcgggcggcggaaccctagccgccgccgccgcccttccccgccccttcctctgccttgccgtcgcctgagcgagcggccggcaaagccggcggctcgcgaggacggcggcggcggggctcgcggtggccatctcccgagctcctggcgcgggtggacgcaaaggcggtggccgaccggagcggcgccggcgtcgaggcgcatggcggcggatccggcgtcaccaccaccggatctggcgcgctcgcagctggatccggtcgcggaggcgcgggcacggcgtcggcgaggcgtgggcgctggcggccgcgacaggcggtggcaaacgcgacggtggcgcaggcacgggcggccgggcggcggcgtcaggcgtgacggcggagcaggcgcgggcggccgcggtaggctcggaggcgcagctactgtggccggcggctcgatgcctggcggcgacggcagcgatgcccccagatccacgcctctcggctggatctggaggatgggagcagtcggcgacggcggcgacggtgtggcgacggcggcggcggcaattggccgacggcagttggcgacggcggtggcagctgtggtggctgctgtgtcatctggcaaaggcggcgtgtgtgtcggcgatgtcgtcgtgtgggtggggctattttttttcttttcctgggtacgactctccaggggtataacctggaccttttttttcctgctctatcattagaatttcc

SEQ ID NO: 51740 - DNA, 1146 bp, Oryza sativa
ccttaaaaaaaaaactttatttcagtcacctgaaatttagactttccgtttaaaataaagtttgacaagtgcgaatcggcttcttatacgctagaagatatttgttattacacgtaatataactacggaatgtatatattcatgtggttgaagaaaatgagaccgaggtgatgaaattgtcgtggtattaattgttacaatcatacgaggattgtggctaccatgggcgctctttcgaaaccgatgattaatcatcaattggctactagaaacttaatttggggaatcccttttgtccatttggtgttaagagatccaagcatagaggcaacatgtggaaatttggatgaggtaaacaacacgaacatttggggtttgctttgcttgatgctctcatgtgggccatgtgttgagccaaattcaaattaactagctaggtcatgtttataggaaatgtgcacatgatcaatgtttgaagttaaaattttgttcatgccaaaatgaacgctagcctggtaaaaaataataattttactacaagatatcgtgacttatttgtgtttttatattagctctttgctactgtggagacttttttgaaactgatgaatggctaataggagttttgggaagcctcttttgtccatttggtgttgagaaaaagcccaagcattgggcagcctgtggtatttggatgaggaaaacaacatgaacattttttaggttgatttgcttgatgctctcatgtggtcagaaccaaaactaactaactaggttatgtctatatattaaatgtgttcttcattttggttttagcttaaggctgagttcaaaacagaggttcatctgtgatttttatagtacgtaaaacaaaacaagttattagtgcataattaattgagtaatatatatttatttgatatttttaagaaacttacctataaaatttttttacataaaatacattagttagcaattcgggaacgtgctcacatgaaacaaggaaatagccattccacatagtcgttcagaattcagcaaaatacttggtcataccaaactgaaaatatgagacatggtatgccaatatttaagccaattttatggtgaaatcaaggtgatcaaaacagctggtccaactttaat

SEQ ID NO: 51741 - DNA, 857 bp, Oryza sativa
tagtaattgaagcaacatttcttctatcctttttttctgaacaaaattgaactagtattaattttcaacttatattaatgtaccgcaaccatgcgtgcgcatgattgttctagatggtgaattgagtgttgagaagacaaaactaagaaaaggagctgaggaatgcaaattacaatcagacagctgattaacaagttctactccaagcatgcatcaacagctttaccgacataattctttataaaaaatcttataattcacccaacatcgatcctccgaaaacgaaaacattgacctaaaaattcaacatagatttgcatcggtccgctagtcagtgagaaaacatataaagacatctcgtccgcataaataataaaacctttctttcctcttttacataaaaaaaagcactacaatcgctgtgaattgaaaccaaagaaaaggtagaatcccatcgaaagagaagccttgtcgtcccccacgggaaaatatttgtacccgtttttcaaaagtcatttcattctagagtccccagtggctcctcaaccacctgcaaattatcaccaacatctagaaacccatgacttcctgacccccctgcaaagtctcctatctctctcatactgttcatttatatgtgcaatttgtgcatgcagtgacagacaaaaaggaacaagaaaattgactgattactgtgccactaaaattctattctaatcatccaaaatattagtctcgtaatccttgagattatattctataaacttaagagagatctaatactacaagttacagattataataatttagttgatgtcttgcttaatctgagataggtacgagtgctactctctctg

SEQ ID NO: 51742 - DNA, 505 bp, Oryza sativa
tcgcgcccacgcttccactaatcccattcgcccgcttgcggcgcatgaggtggatatgcggttgtggcagtcgagatagatcatatcgtgcgcgcgttaattacgctcgccgaccgaagcgacgttaccatatcttcagacgaaacgaatcgccatgtccagattcgtgtgctactcaagtaatgtggcagtcttgaagagaccgctcattgttgacagccgagttaccattgccgatgtgcgtggtttgtgaccgttgggtttctgcccaattgtggagaccggtcccacctgtcaccaggtcttaggagtggcgtcacgcccgaccgtttcccttaaagagggcgatcgccctggcataacgccgggggctactgtcggtgacatgggatcaggagtatcatgactagaggtttgaggcagacacaatcgcacacgtggtctggtacccccgagggacgtcgggcccgagggtgatgcgttcgccctcctcttagtccccccg

SEQ ID NO: 51743 - DNA, 1552 bp, Oryza sativa
cggccggtcagaccgcgggctggccggtccaaccgctcgattaccgccggtctgaccggcatacacagcccggtctgatcggtcacatgaaataatgaatcctgcgatcacctgtgaatccaatcatctccaaaccacttcatgaataaattccaaataacaaaaccaataatctccaatgcccaattattcatcacagaataataataaaaaacacctttgattttacaagtgtgagtgctttactttgttgtaacaggaatgctaaaaaaataggatcctgtttctcctaacccctcaagctggggtctggggaggcatgtgctaccgccggtaggtccggccgatgagccactaggcaccattggtgtagcctcctacttatcctcatctttacctcaactcaacttcggttgccatgggccacctcctttatgttctctcacgtcgctagtagtggtttgtgtgtgcccacacgagacacgaccataggtctaccaggtgtaccactgcctccatcgttgtacgataataccacataccccgcgttgatgttacatggttgtccgatgataagtaagatctatatggtggaactaactaaaccttcacaaactcaagacagtggccacggttcacacataacaaaaatatgtgagatatgtgcggtggtgaaccggtaacgtgttcgttaccacatgttaaaacgtctgagtcggacgaggtgtgttttatgtagaactcataataagaaattttcttattatgtattctacatgtcagctgtacggttcttttttcatttgccacgtgttaatgtaattctatgaactagttagtacgtggcaaataggtggcggttttggtgattgataattaatgcgagtgattaagaaaacctaagggtacacttggatttattgagtgttgaaatgtttgcttgcttgttggtggttaatcatcagtgtgagtgctttactttgttttaaacgtgatagtataaaattgtgccattttcatgacagaggaactgttcctatccattatatttcgtgcagcccctaattgttgtgatactttagttcattctgaaatgtgatacccatgctatataaatatggcattttcatgacgctgaaactgtactgatcgatcgattgtgttcagcccctaattgacacagcatgcaattaacagctcgatgaaagcgattcagtgtttataatttgcagcatagttcagtagccatccagatgtctggcacgtgcttagaccgatggagaaaaaactgacatgatggttgctacatgtcttgagctgttacatctcacaaccactaaataatccgtggttaatcaaaatactactgctgcctttgttccataatatatatcactgtcaaacatgacacgatgtctaaaactaccttttaacttttagtttcttacacacactataagatgtagcaacaaaaatcataacgatagaaaaagtaaattcaaatatcaattgaacaatattatttcttaaaaaataaaatttaatttgtatt

SEQ ID NO: 51744 - DNA, 1649 bp, Oryza sativa
tcagatctactatatgtgttgttcttgttgtaaaaaatactatccttttataaattattaaattattgctcgtgttcgcaaataaatacttgctatagtttattttatataagtactcgtacaaacgaagacaccaaaaccacattgggaattgtttatgtaagtgttcgtaaaagactcttgtatgtatgtttaaaattacttatatttgaaatcaaaagtgtaaatttctatgaggcagcttcaagcttatcaaatttcatttattcacctatatgtctgcagcgcggtatataattctatctttaattattgtcataataaaatctgtctaattcttattccttgtttatttttcaaaaagaaaatatacatatcttatttaactcatataactgtttcctacacattattcgtcatctcaattaatcaatcacaacattctcttctttaattcatccgtctattttcgcatcttaacatatcatcaccatttctcattcaaaccttaatttatacttaaaactccttaaaaatactcatgtctcgaaaacggagtgaggctgtgtttgcaactcctttttcccaacccatctccctcgttttccgcgcgcacgttttttaaacagttaaacggtgtgttttttacaaaaagtttttatacgaaagttgcttaaaaaatcaaattaatctattttttaaaaaaaatagccaatacttaattaataacgcgctaatggaccgctccattttccgtgcggagagaataagttctcaaccaccccatgcgaacacagcctgagtacatgacatagaagcactattcgtatcatacacgctacatatgcatccggaattctaggaggaactgtggtaaacctaattattgggattggtcaccatctagtagtacttaatatgactagcacatgttcacttcaccggtgggactttactactacgtgaaattcctcctcctttcacgttaaataaaccctttacaattatcgccacgttctcctatcttatattagcaaaagttattatacattgcattagagagaaaaaaaagtaccacgaataacaaagtgagtttgttaagtttcttgtgatgcaatcagtctatccggattcaagttatgagttgatacggatgttcgcatttacagattattgtttttcagtggtaaacgacgtaaccatcgacaacgagacacccataatgacgtcattaatcttaaaatatgctgaccaatttttcgagcgcattcgtaaattttaggatataatatttcgttctttccaagattagagtgtgtgtgtgtgtgttttaacatatatgagtgagtgtgcgaacgtgagtgcgtgcgtatatgtacgtgttttttattaatactgtgaataagtagtataacgagtcctaatttcacaataccgagactcccaagggaccaaaacgcaaagagccccccgaaattccaggtgaatcgaaataaatgtgtttcggatggcagggcgtgtcaaaacccacccaaccacgcggctgtcgcgtcgtccgatccgtctgtccatcaccgcatcggacggtggaggcttctcccaggagaggccggggtggcgttggtacgtggggacggttggtctggatt

SEQ ID NO: 51745 - DNA, 2852 bp, Oryza sativa
ccactctggcgccccataaaggaccatttttgggataagtttttctaggggtctacttgccaaataagccttttaaaaggaccaaaatgtgaaaaatcctaccgttggttgggttgggacgggttcgggagcacgtggaatatgcccttgccctcctgtagttctgtactaccggatgaaacggagcaaggaatccgccacgctggcgcctcctctccattttcatggtggctctcactctccaagcgaaaatggatcggaattacgaacgctgatggcatgatcgtagctaggcccggtttattccctaagataaacttttcaccctgtcatgtcatattaaatgttcgaatacataagagtattgtaaaaaaactaattacacaaattacgtataaattatgagacggatattttaagcttaattgcgtcataatttgacaatgtggtgctacattaaacatttgctaatgatgaattaattaagcttaataaatccgtctcacattttacaggcgctctgtaatttgttttttattagactacgtttaatacttcaaatgtgtgtgtctgtatatccgatgtgatatgccaaaacttttcatctcgcaaactaaacaaggccctactaccttcatgtcaaaatataaaaacttattatcggattgaatattttgtagtataaaatatctagatagaaagtctatccaaatacgttgtattaagaaacgtctcattcggtactagattcttatatgttgagacagagggagtacgtaaaaaaaacagtagcgaaagagaaactcttactattcccactatcctagttcatacgtaaaaagacactttttagaaaacaaaggtattactagtattgaagaaataaaatgtctcaatttacaaccgaggatagttaagagagtagaaataaatttattttgtgataaattttaaattgtaggaaacttattttgcaggatggagggagtccttatcagatgcaaccaaaactaaaatttaaaatgaagttgatttgggggtccttttctttgtagtttattttttagcattggcttttaaactgatagtaacacaacttctaccgataatttacttcacttgctagtcgtaactcaaatgatcagaacatctgtctattttcttgtgtcttattggtgatgtagtttgtgtaagtaacaagttgtctctgtttcatgagaagccattattatcatgctgtgtaacttcagccccgttcttttctccaataaaaattgtataaatttggatattcatggcacgcttttcaaaattactaaacgctgccgtttcgtgcaaaatttttatatatggaagttgctctaaaatatcaaataaatatatttttcaagtttataataattaaaactcaattaaccatacgttaataccatctcattttgtataaaacatttcatctttattacgagtttcaaacaccatcttcatttcctaatggataatcatccatttataagtcatgggtttggtcttatacctacagaccttccatgattttgatattagaattatgtttgatgtacaattcacatactctctgttcaagaaaaaaaatccaacccttatatcctgaggtaattttagttgtgagaaaaaaaatactacataacccctcgttaatagaaaatgaatatgttggatgcgtaggtgagcggtacagaaggaataaaagttcttgatcaatgaatcaatagtaggtaaaaatgtagaagtttaaattttaattttaggattgagtctatctgagacacaaggagtactataacagctggtttaatttggtactacaataaagagagtccacgggattttagaggattgtttctattacaaatctgaacggcttgatggtttttactaagtccacattgtgcatttttcagatagtactccgctgacttaaaaaaaggacaaaatgcagtgcaagccagccaaacaccgaaacacgtatagtactgtagaagtatttatatttctgaccaaatacgtccatgtcgtgttctgaatttaggacgtgggagcctctatattgcctgtctgcctgacatagattttcagccaaagccaaaaataagaagattaaaaaaaaaaactctttgttcagttgtgccaacttacacacctagaaaacggagagaaattaattaattaattaatgctatgtcctactcctacagttgactgttgtcaatgtcactccgttgtcctgaaccaatttttttaagaacaatttgtcctcaactttggcccgtgagtgacacagaagcagagggacagttattatagttgcatttgctccaaagcaagtactacaccaagcaaagtcagagtgtttacagttcataatatctgtttttgtttcctcctcgtttaagccagggctgataaaccgtgaaataattataaaaacttctaaaacagtatgtgttattagtggtttaaaaatcaatttttaaaaacacaaggataaaaatactctaaagtcaacttgttttaaacttcattttcaaggtgacaaccaacagactaacaagctattaaggtaatattgttatcgttttgcatacaactaactataagtcataacgcttactaacgataaaaaaaaatgatgataaaacttttataatgtgttctgaacgacttaaaaattcaatgctaaaaaataaattaggataaaaaaaatcaaaatcaactatagaaatattttttaatattaaattctttgttgcagttgataagttaaatagcaaacggtacaattcacagctagaaatgcgaaagctgccgct

SEQ ID NO: 51746 - DNA, 2293 bp, Oryza sativa
gtatacttttatgaaagtatttttcaagacaaatctattcatataacttttacatgttcaaacttaacaatttgatagttattcatgatttatattcctaaggtttgacttaaaccttatcctaaatgactttctttatgagtacggagggagtagttatttaattattcagataattcaggggatattttagacggtttcatatttcattttcttttagaaaaaaatggtttcatatttcggggctgattaagtagaaaaatcccgtagtataggaggtaaatagattatacatatttctttctaacgtgaagatgcatagatatactatttctttacttatttataagatacggtatagttggactcatgtaactaatcattactcaatcgttacaggatcaccataaagtataataaagtataagcatatactcttcgtctcaaattaaaaaaacccaacctagtattagatgtaatgttttctagttaacagtacgatgaatctggacatacttctgttcagattcaactagaaaacatctcatccaatactatgttaggttttttttttggacggagggagtgtggagtacctgattacttggttagtggtttacaataaggctggccgtatttagtttgttgggtgtaaaaattttgacgtatgcggacgtatatttgaagtattaaatgtagactaataacaaaacaaattataaattccgcctataaactgcgagataaatttattaagcctaattaatccgtcattagcaaatgtttattgtagcatcacattgtcaaatcatggcgtaattaggctcaaaagattcatctcgcaatttacatgcaaattgtgcaattggttttttcgtccacatttaatgctctatgcatgttcccaaatatttgatgtgacgtttttggctaaaattttttggaatctaagcacacctagtgtttagttcccttcaaatttccaaaaaatccatcacatcaaatgtttggacacatgcatggagcattaaatgtagacgaaaaaaaccaattacacagtttgtatgtaaattgcgagacgaatattttgagcctaattgcaccatgatttgacaatgtggtgctacagtaactatttgctaaggacggattaattatgcttaatagattcgtctagcagtttatatgcggaatctataatttattttgttattagtatacgtttaatactttaaatgtatgtctgtatacataaaatttttttttgacaaggaactaatcacggcctaagttgtaaacatgaggcccagcttggcatggtacaaacaattttagcttttggaactcacacgaagatgtgacaaaagttgttgggtacaggccaaggaatgcacggtgaccatgtctttgatgtcagctttgtgtcttgggctgaaaacaccctacaaatgcaatgtacagcctgtactatattggagtacttgaaagtctccattcctactttgctctagtagcctaggatcatgtcataaaatttgaacttgaaagagtgaccttaaaatttgactctagcagctgcattttgtctctaatacgcaattaagtttgattgattttacaccagctggcaaattatacataggactttcatcttctcaatataaaccatccaaatctaatttgtcttgatgtccatccactatatatcattcaattgtctgcatcaggtatattcccattgtattagataacgtgtctttaagagacggctggattgaggtatgatctattcatttcaaatctcctgacaatatgcctagaaaataactataaactcaagtatgatccattcatttcaaattacatgccgttctagttttgtcctaagttaaatatttgtatctttcaccatattctagacacgtgatttaacatcgtgagatttatattttagatttaacataagaaatactttcataacatataattcacgtgttattaaactacacgattttttaaaaatgatagttaaaggtaaaaaatatttaacttgagataaaactgaaacaacagacaattttaatcagcgaaagtagctgaattggaagttctatggggagtaggagtaggctctaaagaaggcactcctgactgagtagtcacatttcaatcattagccttgctaaagttgctagctagggtacctggatatattaacaagggatttactaattaatcacctcacttagctaggtagcattcatagcaaaaccatcattatttgggctgcagg

SEQ ID NO: 51747 - DNA, 1157 bp, Oryza sativa
agataaggctggactgcagtaggacgacggccattgggacaccaatcctcgccagcaccatgatccccatcctcttgtgcagcacgtacgcgcacatcagcatccgcagcacctccccaacgacttcacatgaatcatatgcctttgtaccagctatatatgacttgctttttatattgagaataagcattattctcatatctccttttccttttctttttcaggtttgtcctcgtacaattgtaatgtccaaaggactggaaaagtgcagtaacagaaaggtgcttcacaaactgaaaagttgaaagccatgtcactgcactacgtctgacaaaagaacaacagctataggtatttggcatttttattggctactctataaaaaaagcacattaatatttgtgtcaaagaatttaatttctacacaagatttataggcagagggcatgtagctccacataatggagctcagatgatcaaatacataattacatagtccttactacatggagtctaaagaaatatatatatatccaagtagtgcagcatcatgcacggccactacttattagaaataaaatgaagtgaataaagatatgcttctgatgatgccaccggcgtgaaccgagcaatctttcatgcagattttcgcctccacctactcccacgcacgcacgcaatgagcaatagttggttgctgacttgatccgagctttgacaaattcagtttggaactttggatgaatctgcaattctgacgacaaaagggaagggaaggacaaaaaggttttactttaatcttctttcactcaatgtctaaagtgattttcagagacatacaatgggctttatatctttcttttactcaacatctaaaatgatattcagagacaacacaatgggcgaagacctgtatttatctctgctctgaaagactgaaacagtctctgctccagctacgaagactgtatacttgctggtcatacagatccaggatgtgtattatttgcaaattcatcagaaagcatgactcaaccatcacacacactcacacgtaccatctgtcatctctttcgatgatatcattcaacagggtgacaaactgaaaacaaagaattgcaagaaagattggaatgaacacaacaggatgacccagg

SEQ ID NO: 51748 - DNA, 936 bp, Oryza sativa
tgtcctcactcatagcgttggcggtggcctgcactgtcttggagaggaactgacaaggagagtgtgtgaggccatgaaggaggctgcagtgaggtcggccatgcgggtgtggaggagcagcgatgggaggagtaggaggatggggaggatgccgacggtggggaagatagggaggatacggaggtaggggaaggggagggtgagaagagtgggaaggaggcggaggaagtggcgaaatctaccattggagacacgagcccgactgatgttgtgccccgttgaccttgaactcatcatctttgcctctaaggtccacgtcgtgaccgctgtgcattcattgttccatgccacacagcttcaatcgaatctgggttgagttggtttggagctgaaggggagcaagcgctaggatgggaggtgggtgttggccacaatgaggagctcgtcggcgctaggaggggctccatgtccaccgcgcactcggacagctgcttccagccgacgcgagctagtctgtcgctcctgcatatcctcattggcaaggattggagggagggcgtggggtttgggaggacgatggaggcgatgaacctgcccccatcgttgtcgccgccatcgccaatggcttcgtcgtcggtggcctagaggcgcgacttcctcgctagacgccgcatctgaaacgaggtggagagatatggtaagaaagaagaggggaggatggagaaagaagatggaattgacatgtgagtcccacgtctaggggttttttttgtctatatgatgacggaaaacatgatggtgatgacatggtcttaattttgtgtaaattcgaatgacatgaaacgaatagacgaattataagtagtatttatctgatcagcatatttgtactggaatgttccaattaatcctttattttatgggacaattgatcgt

SEQ ID NO: 51749 - DNA, 1986 bp, Oryza sativa
  unsure (1)..(1986): unsure at all n locations
gttcttgagttctttcctggcttcgcatcacgatcagaatacaaaacttattgagtttggcatgcatgaaatctgtaatatttccatcaatgaagaacgcaataccttaagctttctaatttacctttgtttgcatcaaaaaatttcttttcagtgtaccatctctccttgagtcacgcttaattttttatttgctcctcatacgagttgtttggttaatttaggctcatgcccatttccaagtctctttcagcataatcctcatttagatctttcgttcccctaatttaaatgtatgtgcagggtttagggtcctatgattttacaaaaaaacataaataaataaatttgaagtataatatcattaccatatattacggcttagatatatagcactttatagctacacttcttgtgaaattaatgatgtcgtacacacacttatttacattgtaattatcattataaattcaaacttattactataaataacatgttaatatatctaaaagagaagaaggttatagtcgtacacacacagtcacacagacttgatggcgatgctggctctgccaccggccggtcacacccggcacacgggatgcaatgcaagacaaggtgatctgatccgctggttcgtacgtccatggtttttgcacgcatgaccgtgtgctagtgctagccgcttccagcaagtctcgtatgttgtttaaagcatctgactaagtatctctgacatgttaattataagtaatcgcaacataccaaacgggtctagatcacagccactctgcaatataatgttctatcctaatcatcatttgattcagaccccgtatcgatggatcgcaggctgctcagagccgcacgcggcggccaccgcgagtggctggaggctgtacttctgggggccgctccggcgccaaaccacgtcaccgtccacgtcgccgcggccggggagccacagccacccaccgcggcggcgctgctcctggacgtggcgcgacgccgcagggagactccgcgctgcacgtcgtggcggcctccggcgacagcgaagcgttctgagctgcgcgcgcaccatctaccgcagcgccatggccctcntggatcgcgccaacgcgaggggcgacacgccgctgcactgcgccgccagggcggggaacgcggcgatggtcaggtgcctcctcgacatggcgatggaggagnacgaggagcgcggcggcgcgaggttcagggtggccgacgtgctggagaagcagaacggccggcgtgagacggccctgcacgacgccgtcaggctcggcgacgagcgcctcgtcggccacctgatggccgtgcatccgcggctcgcccgtctccccggcggcgacgggatgtcgccgttgtaccaggcgatctcactggggcacgaccgcatcgcggagctcctgcatcagcaagggggcgacgagctctcgtattctggaccggccggccaaactgccctgcacgctgctgtcctacgcggcgcaggtacgtgcctacaagtgaagattgatttttttttcatttctcgatgggatatatttcttatatatcatctaaatagttattatttttcttaaaaaaattaacagcatatattaacatagattgatatgaactatgtcactcgtaatatcaaattggactcttacaactaataccaaaagaaacaaattcaacttaaatagttaacacacattcctggttatatttgtttctttataattttcaaaagttgatttttttatttacatatttgtaaagtaatatatttcatacttggctatcttattgttttttataactatttagggatgaaaacattttctccgcacgatcaatttagatcatatgaaagacccacacgtatacatcgacaaatacactctgatgaggcacgatcaaagaaacagaagcacatcgacaaatgcacctcttggcataagctgggctgcagga

SEQ ID NO: 51750 - DNA, 659 bp, Oryza sativa
ttcctgcagccccttatttaatttttttttgcaaatataaaagacaaaaaattatgcttaaagtaccgtagataataaagtaagtcacaaataaaataaaaataattttaaaatttttttgaataagacgagtagttaaacattacaagtaaaaactcacaatctaatataggacgaatggagtactttgatatcccacttttctcacaattccaaactagcaccacaaaatataattttgcaggccctcactttcacaccaagaaaactaaacaaagaaaaagtctacggccgcgttcccttctcttcctccttccttctttcctgctgcctgcctagtctagtctaccaccctcctctccaacctttctccttcctcctcatctcctcctccaagccgagccaccgaaattcctccaatcctacagttcgctcgcatctctccctctcctccccgtcccaggcgcggccaggacctccggatcggtgaaaagaggccgccttggtgcttcttggcgccgaatcttggggaggaggtcgctcagattcggtgaggggctcgggttcttgcggggtggaagatgtgtttttggggggcggattcgggttgggggcgttggggaggtgcggaaaggtgggaatttgggggctgatttggg

SEQ ID NO: 51751 - DNA, 1396 bp, Oryza sativa
atgcatgaagtataaattatagataaaaagaaaaactaattacccagttatgaaggaaatcacgagacgaatcttttaagcctaattagtccgtgattagctataagtgctacagtaactcacatatgctaatgacggtttaattagtcttaaaagattcgtctcgcggtttccaggcaagttctgaaattagttttttcattcgtgtccgaaaacccctttcgacatccggtcaaacgttcgatgtgacacccaaaaattttcttttcccaactaaacacaccctaactcccctcgtctagccataatctgccccaccaataccgtcaatctggccccgccagctagccggaaggcgcgaatgatgtcaacgaggcctcctaactagagatggcaatgggtgcataccatcgggttctcttagcttgccccatactcacacccgtgatgtttaaatattctcacttaaatatccatatccatcgtggatacaaaatcgtccctatacccacacccgtgtgggtaacgggtatagatacccatacccatataattgacttgcagcatttataattttgtactataattagccatattagagttgtaaaccatcaatattttctttagcaacaatactattaattaacattagcgttcaaaggtgaggaaaaaaaattatacaaccacattacataatcaagaaatcaaataacaatttcatataactagactagaacaatacttaagatgtgaaatgagttttatgctatgatttagtagtcatcgatacttatattgctcatagtttgactcaatcaacggttttttttcacccacaggttggtgggtacgggtgggtaaagaacggacccatagccatgtacccaatagataagagttttcgcccgttagtagacccatgtgtataagagttagaacaattagcttctaatagagtaaaaacctgtcgggtctcgggttatgggtctctattgccatctctactcctagccgacctccaccctttcccgcatctcctccttaagcaggcggcggtatggtgcccttgccccgctgattttcctatctctgcggctgcccgctttcggattcaccgtcatcctaactagtcgatatagttgggtcgtttgcccctaccactagcacgggaccactgtccaccttgtggctctgatgctactaagggtgtgttcggcacccccccttcccaatcccatctccctcgttttccacgcgcacgcttttaaaactgctaaacggtgtgttttttttaaaaaagtttctatacaaaagttgcttaaaaaaatcaaattaattcatttttgaaaaaaaaaatacttccaccgtttcataatgtaaatcattttattattgt

SEQ ID NO: 51752 - DNA, 2231 bp, Oryza sativa
agagaataggaacttgcaagggaattaaatttttgaagttttaccacatgttatctctttgtagtgtaagggcttcaatcctttctttactaggtaaaagcagttgtccttctccccttccctcctcctatcctacatattaaaaaaaaaccagtgaaaagacaaactgaaaccaaccgaaaaaaaaatagggtggaaaaaattgaaccatgtttctcatatcaaattaaatcacgttctgaaaatcctgttgcaacgtatggacatatgactagtgccatcagagaaacaattacgaaactttcttgcccttttaaaaaccatagggattctaagtacatggcacttaaattcctgtgtgtgtactaaaggtgatctaatatgattctccattacacatttgcacgtacgaccgtgacaagtcatctcatgcatgattgatacaaatcaaacaaatccatgaatgtgatccccattccatgacaacatatatactccctccgtcccataatataagggattttgagttttggcttacaatatttgaccactcgtcttattcaaaaaaaaattgtgcaaatataaaaaacgaaaagttgtgcttaaagtattttagataataaagtaagtcacaaagaaaataaataataattctaaaatttttttgaataagatgaatgatcaaacagtgcaagtaaaaacttaaaatcccttatattatgggacggagggagtactagatttgtactacttcagatttcctaggctgagtttagttccttccaaagttgaaagtttgggttgaaattggtacgatgtgactgaaaagttatgtgtgtatacaggttgacgtgatagaaaaagttggaagtttgaatccaaagtttgactgtttggtagctagccagtcagccagacacggttttgttgagtcctcaatcttcatgcattccaccatgatttgatagccgaacgattaatggcgaaaactgataaaattcaaacggaatgtatcaaatatttggattttttaatacatgaaaatttatcaagtggttcttaaatatagattggctcgataagatcaaccatgacagtcaagcagtttttgttgtattatgaaatcctattcatctctcatgctttcaaatctatatgattatttccctagcaaaacaaatagatccgtcctaaaaaggaattattcccatttaatttgaaaatgattctgcatgagttctgtaaagaattttgtatcgaccaattcaataatttgaagaacagagtcacaaagaattttcctgtattctactctgggccttgcatgcatcacagtgttagaaatggctttaagcttttgcatcctgggcctccaaaattagttggtttaaaagcaaacccacgtacctaattaaaattgggccgcccttgttcacactgcacacttcatgctgccgactacaattaggttttgtttaagagaacattgactaattatatttgtgattatcaagaaaagatgtactgcactatgcacatgggtcacattcaaacctgatcttccatttaagattgagaagtgaagtgattagttcctcttgaattgcatgatcacctcaactacaactaggaacttttagtttgagaggtagtacaaattagaaacctaaacggctagaatccaccccttttgcaaggggctagattccacttagctccacacatcgcattaacaaacattaattcacatgaaaagcaactccatcggctcaactaatctgttctttccgttccattacatatgaactaatattgatcaaggctaaaaagcaggctatatttttatcttacattaatttgtttgtagtaggtatcatgcgaagcaaaactatagtatacatatgctcatgggacgctaggaattgcacattgacctaaaaaatattttaagcctgaatctctattgagatcttgtcattgattatttggggccatttggttgaaacacagcacaactttgtcaagaaaggcaattcataaaagcaaaagtaaacaagtgaactggcgcgtcatcatccacaaatctctgttttaacttttaattagtacgtaactaacaaaaaccaaagaaattattacattaggacatgtacagacagaggaatagtacaagagatgtgagactttcagaaagtacaggaaatgtgttgcaaataaaagatctcagtgcc

SEQ ID NO: 51753 - DNA, 853 bp, Oryza sativa
ctatagctgttgttcttttgtcagacgtagtgcagtgacatggctttcaacttttcagtttgtgaagcacctttctgttactgcacttttccagtcctttggacattacaattgtacgaggacaaacctgaaaaagaaaaggaaaaggagatatgagaataatgcttattctcaatataaaaagcaagtcatatatagctggtacaaaggcatatgattcatgtgaagtcgttggggaagagaacaaaagatgaatcatccctgtgttcgtctgaattgtatatgtggtttgcacataaatatgtcgtcatttcttgtaccgaaaacaattggacaaggcgacctgactaaaagtttttttgaaaacatgaattgaagctagaagaggacaatagaatgatttcacatgtcttgaaagtgtttaagtgatacttcgtattttctctagtctctactgttgtaaaagtgcaatcgtcttttttccatcccctccttctactgcgcgcgcaatgtgtacatccgattttttttcacatcatatgcctaacctcttagctcatccctaatcgaatggacctgcacgttgtaaggtttgaagaactacgtacaagtcaggattggtttgaagaagttgttttctccaagtaagaagtacacacaaggttcttccatagaagcaacgtccgtgcaaagattgacttaccatgtgcaagatcaactctgtgcaacaattctttctgaaagcaattgctacaatcctttttcttccatttcacacgcatcatgcttcatgccatgtactccctcgtcccaaaatataaaaacctagaactggatgggacgtgctgtccaa

SEQ ID NO: 51754 - DNA, 1144 bp, Oryza sativa
agttctcaacctccaagagtaacaaacaccacacaactcttggtcaaaccctatgctcaagatcgagtgaaacacacactaggccctcaaacaccaaatccacaaccaccaagatccaccacacaaagaacaaggagggatttgagagagggaggaagagctcaaagatccaaagcaccttagcactaagctcaacccaaagtgaatgagaatgaaatgagttgggtcaccctagaaaagggttaggtggggggtatttatagatgccccaaaatgtggccgttggaggggaatctttcagcccacgtcggatagtccgatacaagatcggatagtctgatattttaaacctccaaggcaacgagaaacagagaatgaagttccatgaaattttggactttccgagacattggactatctaatgttaaattggagtatctaatattttagaagtaaaaacttcgtcctcaaacagagacttaagttctatgaaatttcggagtctttgtatcatcggactatctgatccgacatcggatactccgatacttagaaaaactcattcgataggattttttcaaatcaagacagttctgtgaaaaattggatagtccgatacatcggatagtctgatttcaaatcggatagtctgatgttgctcaagtaaaaatgcaataactttttactccgaactccgatttcgaagatcttggactctatggaaagctagtttcgtgggctatcaaacccaacataaaacatggtccaaaaccttcaagagattttgaaaaacttgcaaaaaaacccggtgtaagtgttgtgacgagtgaaacaactcgggattgaaattttggcttaggtttttcaactcacacaaagatgaagcattttgagcactagtgttctaccaattatatgcatgtggtatccctcttaatagtacggcattcctacgacacaatgcaaggtaaaagatacaatataacatttgatcattgccgcattgcatcttgatgtcgcattcatggggtatgcatctcattacaacatgtcgaggacataacaaccttcacatttgcttgaataaaagtgttagtcctctctaatcgcattgtaatcaatcatcaaaattattaggggtcta

SEQ ID NO: 51755 - DNA, 1507 bp, Oryza sativa
tttctgcacaaaacaaaaaatggggttggttaaatcattttctgaattaaatttgttctagtattccctagtgggaagatgatgattagaattgctattgctgaattaatagcacaataggtcatcaaaaggacataaagcatttgtgcaatgattaggattcaggtgacaagaagccggccttaattaagcttttggaaaaggaaacaaaaccacttgggagaagaaaaaaagaaataaaaggaaagtagccaacatgaagaaagatcctacaaataatttgtctgatcataaattggatgtatgaatgattggagtccatgtggcatccaactgtggccaaatctattcaagaccctacaaatatgtcatactagtctgaaatagtctatctgatgacctatttttaaggataactagtgcaacccacaatattgattactaatgtgatgctaaaaacaaaaaattacaaacaacaagttgaacatatatactccttaaacaagcgcaaccattgacaaacaacggccatatatagaattttctgaaactgagaaaccaaacattgtctgaaactcatcacaaattcagaagccaaactaggagtgaacaaaagactatgtcaagtcatgccccatttgccaagaagactttataggtagaatagattgactgctaattaagttagattgtgatgaaacaagatggacttgaagctatgactctcactagccgtgttgaccaatctgcctccaaacttgatggcttcacactaacttactcaacggggcagtgtaaattgttgggttgtttttagcagcctaagctgaacaattttttcacacttgacgtatttgctgacagagctatactttgatccagtctattaccatctccagactttgaattttgtatgtggttatgtgtgagctcttgacctcagatttttggaatttttcaaaaagttatcttctagaactacttatttgtctcattcatctgttggaaaaatgggttcttgggatggaactgctagctggcaggaaaacgtttaatggcagaaaatcttcagcatatggtggaaatacattcatattattattgttgtttttcatttaatgttgaattcacctttcttatttgtgagggaaaactctataaaaatggagattaaagtgtactgactgctatgtgcgagctattgacaaacagtaggattttcaaaaaggttaacttctagacaactgttttctccttcatttttggggaaaacaagttttctcaggatacaaaactactaattggctggaaaaaaataatggtggaaaatcttcagcacataatagaaataattcctatattatttattgtttagtatcaaaataacttttcttatttgtgagggaaaactctacaaaaatggagattaaagtgtggtcattgtttcttaattttcaatattttaaattgcgattctgatctcaagcgattcacaaagaacccaaca

SEQ ID NO: 51756 - DNA, 2452 bp, Oryza sativa
ctctaggatttgaactccgggaacaacttcgtgaacttcatcattggtgatctcccttcatcctccttttagctttgcttaattgtgccgctatagatctagtcgctatttgtgctttactcttgtttgtgtgatagatctacttgttgtgcttcattggtggatcagacagtctgatccaacatcagactatctgatattttcggatagtctgactgtggatcagactttccgaccttatatcagttttagcttccgcataaagttttaaattagcctctaggccgaattgaccctttcaggtagatgcatatgcgcacgagtgaatttaacatgttgtgcggcaagcaaataatatggctccgatgtggctgggtgaaataatatcatgatatctataaggacccaaggcttggcactagatggtacctaagtgaggacaaaaggatatatatacacaatatgttttttaaaaaataaatctaagtagaatcatagtcacgtaaggatggaccatgtagcatatatggaggaagagatgtggcaatgttgtagctaactagtactccactcaatagcggtcttctttgccagcaaagagataggtgtgaacccccttactcatgtgctgagtaggatatgagcaggaggaaagtacgtgaatgtcatgacgggaggggcaagggacattgagcatcaagtgccaacatgttgagtaggaggagcagagatcatgatgggagcaagcagcgagaaagcaagtgacatggaggttggtaggagagaaaatgatgaggaaagggggagatttggggtttgtggctatgatagaagtcaggagtgagatgacaaaggtgagcaattttgttgatatataggctaggatgagaaatgtgggtaatttcaacaatgtataaagtggagttcaccatcatcattatgtccttttaaagtagtaaagatgtttcgtgtctatagtcatcaaattttattagtgcctattacacattaaactcgtcacaccacctcacacacttccatacccaaggtgacctcacgtagcattccgctgtaggaataatgtgtgcacttgtaaactttgataatgaattaggggtgaaaacagatcggaatagcggttataccatatcaccaaaatttaaagcaaactcaaagcaggcggtgctgcggggagtagaagatggggacgaccagaggaggcgtcaacgttgagagccacaggcaatgacgcgtcgtacccgcattcctgcttcgccgcttgtgtgcgcatgggagtgtgacggcaaacctgcctagcagcttgcattggttcgtcctgtgtgtgagagagataggttattaggtcaactaatagatggtctgtcttatgtgaaatgggtcaaatagagtggttccatgagatgagaaagtcgggttatctaccaaaccctccaccagatctgcaggatatcgccaacaccacgtctagctccgtatccatagccaaattcgtatccgccgaatatctataaacccttactatatcctcacttcggacggatttggagtggagtggattagatattatccgattcactttcacccctataacgaagcaacttttctggtaattgaaatctaggggctagatatgcaaccttatttttatttaccataacctttattatgaacaaacaaaccaacaaaaaattatccaaaatgttgccaaacacacctatataagggcatgagtgtagcaacaagctagccaacaaatgctaaataatgaccttatacccatgtaaattgtggtttttgtttgttgcctttggtgttaccagtgaaagacggtgatgagttgtgtggactatgggaaaaatcaaagtgaggctgggaaaacatgggagcaacaccgccgtcatttcgcaacagaagtcaatatagattgtggcggtgttgtatggtgaatatttgtactaaaaataagaccatcggcaatatagattaatgtatattggcaatacaatacctctgcttttttaatatagggtgtgtttgaattttattttatcaaactttgatcaacacaattacttagctagtgaaaagagtgcaacttgagctataaccaaagctactttaaacatacttaatatatttgtctatttatataaatatttttagaaaatgaataatcaaacatatttcaaagactagaaaaaatgtctgtgcgttgcaacgagtgaaggctattttaatcttattattgttcaatgtaaaatttattgtgagaattcgcttggatatatattttctagaaaattatgacaagttagcatgcgagtttttttaaagagatttcttatatgagcctttctgtattttcaaaaacgaataaagttaaaactcaactcaaatacggatctgtatttctaaaagcgaacgaatttaa

SEQ ID NO: 51757 - DNA, 572 bp, Oryza sativa
gatatttttatgagaaatggaagaaaaaaaagtgaatgtgtagaaaatagactcacaaggataatataattaatgagtgaaaatgacttacataggatatgttatataattatttcatccagggttttcacattgcacttttatgtaacttcatatcaaccatatacgcaaccaaaatgtagaacttgcttacttagtaagcattcatgcaaagatcctacttaatgaccctttgtgttgataagaatgtattttttccgatagtagaaatctatctagtatgtacccccaaccgttgagagtttctaaaaaaagatatttttcatgacatcaaagaagttcacaacataactatatattttccaaaatacataatttacccatgtaaaaaaaattcaagatctaatataaagaaaaatcgatcctatcctcatcagtcatcatagtctcattttttcgcttatactaatacttagtagctaaaattcaaattttcaaccttgaatttataattggtttgaggttttttcatctaagtttatttttcagccattgcttttaaattgttaaga

SEQ ID NO: 51758 - DNA, 733 bp, Oryza sativa
tgatgtacagtaaacattctctaattatggaataattagacttaaaaaatttatctcgcgaattagtttttatttatgtaattagttttgtatatgtaattagttttgtaagtagtctatatttaatactctaaattagtgtctaaatgtagagactaaaattaagtccctagatccaaacaccaccgtagacacgaatcaactaataccgtagcacacctagatgcagatgcacctagtcatattctctttctcaacacatatctgagcacctctgttggcgctaccctccaaaagagaattagaacgcacagcggagtgcagaagggtgcaccgaagatgatcaagtagacaatgttggagatgagcaggtcgatgccgatcggggctccaatcctgagcacgaccctgatccccatcctcctgcgcaccacgtgcgcgcagctcaccatcagcaccagctccctgttcctgaacagcatcgtgccggcggcgagggcgcagacgccggcggcggtggcgcgggacaccggagccagcaccaggtacacccccagcgcgaaggccaccagcaggctcctcatcgacaagcgcatccaccacacggaattcttgaagtacctgtgccggacattcatctccaccgccgccgtgccggcgtacatcaggctgagcgtggcgagcatggagcaggtgaaggccagcgccacggcgtacatgaacgcgtcgaagg

SEQ ID NO: 51759 - DNA, 708 bp, Oryza sativa
gaacggtcaaatatgtgctaaaaagtcaacggcgtcaaacattttgaaacggagggagtactattttaggtgactgaaaattttatgtgcctgaaatctagccattcccttctttgtggcaaaaccatatatatctcttgcaacggcggtgggtttcagatccatcggaatagtcaaattaacatgtcacaatattcatacgtgtgatactacgcacgaaagtttgaaacagacgagcactcgatcgatcgatcgatgaaatcctgaccgttgatgcttgatcgtgtggatgtacgcccgatcagcctacgtacgtgtgatcggcggtgtgcaaattagtcctcggaatggctcgcgcattcacaaccagcactgggatgcacgcacgtactgcgttacacgtctgcattcagttgtggaatctttcatctaggaccttacttttgagatatattacattcagattcagttctttctctcctcctttctcaatttcttctccatggttttttgcgcgcgcattttttaaattgcgaatcaatgtaattttttataaattatagaaaatttgttttaaaaatcatattaatccacttttaaaattttttaaattaatacttaattaattatgtgttaatttatgcttcgtttacatgcttgaaggattatttcccaaactggtaattcttacttaccttagtagttaaa

SEQ ID NO: 51760 - DNA, 870 bp, Oryza sativa
cccccccccctccgaattttttaatttttgttttatttgtttgatatttttttcacgcttagggacacacaagaaccaaccatagaaaaattgaactcaaataaacgtaatatgtgacatgtagaatttttcctctcctctcctctctccgaactagtgcagaggagagagatgtgcaacttttttatttttattttatttttttgatatttttttcacacttaggaactcacaagaaccaaccatgtaaaaaataaactcaaacggacgaaatatgtggcatatggaatttttcaaagctccaccgaaaaacttctctcctcgaaaacacaatcttgcaagcggaatttggaggttttaatatcgccgaacccgacaaagcggggagaatcggatgtaactttttctgtagatgtccgtgcatatattatttgcctgattccgagtccgtatgagaaagttatgcctattttaatagatgacatattttgtccatttcggtagagttttgaaaaattctacatatcacatattttgtccgtttgagtttattttttatacggttggttcctatgttctcctaagtgtgaaaaaatatcaaaaaaatgaaataaaaataaaaaaaattgcatctctatgtactgtttaacttatatatgtcatttcatgtggttatattttgaattagattaagtaatttcatatagtggtagagtgcattatgtttaacatgctgatcaaagggttttactaaaagagttatggtctaattttagtgaaggtgcaaagtagactaagtggtatgctagatattttcagacttagctaagtggtagttcgagtttaatttttttttgtggttggttgtat

SEQ ID NO: 51761 - DNA, 647 bp, Oryza sativa
tgagagcaagtataatagtaggctataagcaggctaaatgttgaggtggaggagaaaagagagaagagagaggagaagcgggctataaacttacagccggcttgcacacaagaaccaagaaactctgtgagagagacaagtgggccctatattaattgtaaagagctaactattatatgggtagactaagagaaggctataaataaccttatagccaacagattggctgtattattagccttgctctgtcagggtgaagaattttaccgaggatctaaactggtccatactctcatgcataatgcctttttggttgtaggcttggaatttttaataatttcatttaatgagctcgttttggaactgtgactgtcaacttgaaattggtccaacacatagccagaataaattggaccttttgctttcaaattattttgttaacctggacgttgcactttctagtggccagtttttgtgcagcccataaaggaaaagttgaacaagtgcggttggatgcctttgcataattggcttttcttgtggatgagcctacaaaagaggtctttaggagggcaaggcatgctcgtctcatcatgtgattatatgatctaaagaaaaaaaatccacaaacaattgataattttaat

SEQ ID NO: 51762 - DNA, 797 bp, Oryza sativa
ctttgtttattgccaatgcaatttgccatggctgtggtggcggctttcaagtaggatagataaataaatgcatggaagagaatgcttatctttgactcgaattatatatagattagtacctttcaattttattgttaccacttcactacctacctatagtgagctccagtgctggaccgacactttcacaaggtgcactcttgtttcagtacttttgcatatttttcttcggaacaagacggatccgttctaaagcgatgaacgggtacaaaatgaaatggatgattcaaactcgtttatataggggtagattaaaaattaataagctcgccaaactagcttgggatctaaacaatacagtatagaagatttcttttatataaaaaaatgtattttgagaagcatgaagcaaataatccacggcaataatctggtcataatatacataaacgcaactactcctactaaattctaattattggtagtttgtaaatatcaatctcatcaatcaatcattcttcagtttctgtacgcaatgcccaattgcccatcaaatatttttttcttttttccccttccttttgttatccatttattttcttttttaatatggaggagaaggtaataacaagaagctggcatataattggattagggcagagagaaacgtgtaggaaacaatgcgagaatgattggatgagggcacccaccgtgcaatgcatcacgtggaagcagcgatattatcaggtcgatcaggaggacgatgacagtgggcccatacaaggagtggggcccac

SEQ ID NO: 51763 - DNA, 787 bp, Oryza sativa
tggttgataccctgcattttgccgcggtacatgtggatgaatacatacatgtttaatatgtgaaataatatggagataatgatttgacattgattgcatattaagttctaaaaatacaacaaaattgtaaacgatatatcatatttgcatgatatttaaaatactctagataataattgctagtgggtaatgatgtggcacacttgcatatgatttaaaatactctagataataattgctagtggatgatgatgtggcacacttgcatgttgagatttagaagttagtagacatcaactttacagtaaaattgaatatgataagccaaaacggcctattaaggaatataaaataatttatagataaaacttgtatatatttgtttttaagtgacttaaaagctaatgcgtaaaaagaaactacgttgaaaatatcttaaaataaacttcaaaattaagtttaaaagttcaagttttgtcttttgctttagcttattaggcgaaccgatgggacctgaatcctctagtgacctaagtgcagggagcaaacactatattacagagtgaaaatatagagcacacacatctttagaagctgttctccatttcatagacatggatcctctgcaatactacgcctgcagtcccagtgactgacagatggatccagtcctacatgttattgttacagataatctctacagatttctattatctaaggatgtggacatatctattggtcttgaaattacctgagtgcagagtgcaaaccctgaaatgttcccaac

SEQ ID NO: 51764 - DNA, 506 bp, Oryza sativa
ttctgtagctagcatcaagttaaaattggtgccactaacctcttacacctcaatacctgctaccattattatccttgaaaaacatatcaaaaacttattttcgctacgttagaccgtttgtaggcttaacttgctagtttattcgcgtcagttcaccaagctcatttgaccttttacctttagtaaagcatgaagccgcgtacccattgtatatgtccttacgacttcaaatagttatatgtatttctagcaaacagactcataggtctagtcaccgtggagtacatacttacctctcttgaagttatgtgggtttgattccatatggttgaaaaaacaaatctgatatgggccatttttcagaaaatagttgagtgggttcttcctatagcgtgaatatatatgcttatacgatgagcttaagatcactttgtgtaacgccccccgtagccacgtacctggagtgccacactaaaatacactcaaaaccactaactcccaaaatt

SEQ ID NO: 51765 - DNA, 838 bp, Oryza sativa
tctcgttttgcgtgcccgcttttaatcttcatctatagaagattcaaatggggccatactgcgctataactagtctatatatattgtcatgtgacaactcggattattgccaccaaatccagatctatatttctagtctttaattatgtccttaatttaagattagttggaatggtgtggcacacataacaaaacgtaagccacatccaactgttattattgacagggtacatatatataactagatgacaccttgcgctttgtcgtgggatatatgaatgaaagtgtgttgaatgttgtataaatgattggtgaatttggattgaaataatttgaaaaatgatttgaggatgatgatttagcgtgtgtgtatacatttgagtttagaatgtaataaaattgtaaatataattactatgcttgcatgttgagctttaggtgtttagtagattgatgtggcatgcttacatggtaagttttaaaagtactaataaataatgcttgcatgttgagattgagatgtctggtgggttctaactttatatgaggtcaagattagcaaaggcaagatttttgccacctcacaataaatatgtgtgtagttgggcagccatttaattaactagtttttcacatatatattattgctattttattccttttcaactaggcttgtgcaagtaagtgttactatcgttaagaggttgtcatacaattatgcacacggtggtcaataagttagatacgtacgggtctctaatgaagtagtataaaagctagatccaattggatatataatataataatacaaaatgggacctggtctgaggtttgaagg

SEQ ID NO: 51766 - DNA, 510 bp, Oryza sativa
gtacagttgtgtggaccgtatgaactagccggcactataaaaaaagctcaccgataacgaaagatacaaaattttcgattgggataatagaggcatcttccttttaatttaaaataccaagcgggaagtttacttgcttgagcgcatgggtaaaatcgtctttttggcgcttcgccatcgagtagtagtatagcttagctgccagctaagcccacagcttcgaaatttttgaaattggagcgtgcgctgcgctgggccgagccaagagtgcgtgaagaagaagacgaggaaaaaaaaaagaaaaaaaatattatatatatatagtactcgttttgttttttcccaattcagtttgagctcggagtactaatgctggccgcatttgcttcgcgcgaacgccacctgtcaccaggacacccgaaaagctactcgtacgggaacgcatctcctccctgcgccagtggggcccgcatgtcggtgagagtaagagtagtcgggtgcgcacgcgcc

SEQ ID NO: 51767 - DNA, 831 bp, Oryza sativa
aacttatttcaaaaacaaaaggagagagaagcaaggtccatcgcttgggccgacgtcctcccccctttccttcttacttgggccgacgctcccgcacggcccaaggccgcgctagcccatccccatgccgaaccagctagcccaaggccacgccagcccagcttgcccgcgcccctccttcagtccagcccactcgtcaattttgtccccctcctctagcctagtccactccctcggcccgtagagtaaaacagaatgccaaattagtgcacgattaaggccctatttctttcatgttaggattattataatctagattattgagagtaaactgaaagaaacagataatttattaaagtagcttattataatctggatcccagcttattataatccgataagctcatttatgtgagctttttccatattattgggtgaaaaattacccaccatgccaccccactccttctttaaacttgtaaacccaataatctagactctaataatctaggaaagaaacaactaaccgcctattctactacatattatagcttatagtaatctgactcaataatctagattataataatcccaagctaaaagaaacagggtctaaaccagaatgtcagattagcgcacgattaactaaatattagcttaaaaactcataatataaattaatatgatttttaatgaaacttttatatagaaaatttttttgggaaaaacgattgaattccattagccgataggcgaaaccgaatttttttttttactaggagagcattgcaggcgaaaccaaacttggctttgggttttcctccctctcga

SEQ ID NO: 51768 - DNA, 1042 bp, Oryza sativa
ttgatggttttggcctaaccaatttcggtcgtctgagccttcagcacatatgcctaaaccaggcaattgattagggttgcaaccaaacattactctggcagctctcaagcagcagtccgttcaggcaaatttggttcagggtagcaaccaaacaccccctaagacctgcaacccaacccatatttccaactcaatcatacttatgttatcattgtcgcacattgcaattatcgactttataatggtagtgatgagattaattggaagagcctaatagaattagagcaaccggtcatacacacaattagatggaaccatccactccatcaaatattatcgttgctcttgatttaactgagaccggtcgtctagcatagggttaggatctccaatatgatggctcgatgagacttctcgatttaacaaaccagatttagggcccatttgatttggaggaaaaacataggaattttagaggatttcaaaaattttctatgaagccctttgaaacaaaggattgaattctatctaatcctttgaaattcctatggaatgaacaatcctatagagattttggaagaaatttagcaagagtttcaacctcttgctaactttcctttgagtctatatctctcatccaattcctgtggttcaatcaaacggtcattcctgtgttttttctgtgttttgcaatcctctgttttacacttacattcctatcaaaatcctacgtttttcctattcctacgttttctcaatcctgcgaccaaggtcttttcgctacaattgtatcatattgatgtaattgacccattacaataaagcttctttcatctgagaaaaaagagatattttttgagttgtaaaggagagatggagcaaaggtagagggagatagctgaagagatatctgaatctgcaggaatctgaaaggagagcagcaccacccaagggcaagctgagagaagaaaagtgtgcagtgtagtgtggagttccctccaaaatcactggctaccccgccacatcctctgccttccactca

SEQ ID NO: 51769 - DNA, 542 bp, Oryza sativa
catagtacagtgcactaaaatcacatgacaaaaagaatgaaatattacaataactcaattttttttgctagaacagttaaagatctacaagtaaaaacaaaagatattccattgagaaaaattaacctgtcaaggcagaatttttctctgtttcatctggtggattaataggaacatgaccttcaatgataaataggcagaaacatcaataattcatatttaattttttttaaaacagattaacaaatctagaaaaaaaataacctgttttgttcaacttcttcattatttcatcaatgttgatatatttaatctacacaaataaaaaatgacagttaaaaactatcaacaattagagttctatctattcatattataatgattgaaataaaaatgaaaaaaaaacctgttctgaagaattcaaattggtagactattcacaggattaaattcttcatttggaattggcaacttgtcatcatctagtactgttttactgtttccctacaaaaaaaaaataaaaggacaaaaaatgtttaatg

SEQ ID NO: 51770 - DNA, 1086 bp, Oryza sativa
caatatccattcgggaaagggttctcatctctcaagtggatatccctcattttttttacatgtcatctaaaatagtcataaataatttaaaaagatagattaatatgaactatatcactccacaaacatacaaattcaaatccaacttttacaagttgtaacaaaaacaaaaaaatatataactatgaatgcacgttaattattttcagtttaatttgttcttttttttacatgtaaaagttgaatttagatttgcatgtttgtagagtgatatttcatattaatctattttgtcatttttgtcaaaaatttgatgacatgcaagaaatgagaggaatctcctgtccattctacttctttttcagactcagtatattaattatcgtctggattattattacagaagaaaaagctcagaacggtggagtactggaactgaaagttttcaacttgatgaagataaggttcaatattgttgagatgaaatgaataaatcccttggagtgaatcatatgattctgcatgcagttgaaagatattactgtccattttaaatttgaagacagcatgaaagcccacagcatatgcttcaactgtgtgatctgatcatttactaatatatatatatagaccaaagacgtcgtttcaggaggggtgctagctaattcccctttgtgtttctttttgtacaattgcagctaattaaagagcagtagcatcagatccttttctcatgtcaactgaaactgagagagagaggcagcaaaatgaagaacagccagtgcatgcatgtgttactgtagtacatatagatgaccagaccacatgggtgtgcatgcatgctactccccttacttcacttcacttcacttcatcacttccatgggagaaagaaagaacattaaagaaatggtttcaagtgactgattctttcatgcactaggaaaagtcccatcaaattttcatttcaggtcatctcagacacaaagtgataaggtcatcgcttttcctctcccctaccattcttttctcaccttctcatctcaatcaacagttgagaggacaactggcctcttgcattgcctt

SEQ ID NO: 51771 - DNA, 678 bp, Oryza sativa
gaaccacttgaatgcttctttgcccttgcagaggagagagataggcggaaaagcacaagcctactcctagaaggtttgtaccactaatgctctatgaagatatgtttgtcttcagacatagtgtttcttagttgtttcttctgctaaattataggttcaaggagagaggctgaggataagatagttcctagagaaatcgatgcagatgattctgatgtggaacccagaagtgatgatgaaaggtctgtcttgcactcttgttcaatcttttataaatcaccatgctcatgtaaaatacaggtgacattcttgtggctgcattagtgtgcttatctccacatctttttgctgaattaataattctggaggaaggtagtttgggttgaaataattttgtctgtcgatatatactgtaagcttggttttggtcagaaggctagtgaactagtggttgatatccattcttatctagaatattttgttgattgtgtccactgtccagccatttttataccatttggataaatcatgaagcaacttactttccatttttagtgcatatagttgcgtgtttggattcacatattcttgttttatagttgaaaattgcaaggggtatgcggctttaaccccaaagtcccatgttcaatcccaacatgctcacaatttcttcttaaa

SEQ ID NO: 51772 - DNA, 572 bp, Oryza sativa
gttgacgatccaaatagctagctagcctcctttttcccctttagcaaaagaaatatgcttttcatatgactaagattacataaagcctatagaacgggatcctattcagatgacggcatacttaatgacgagcccatcaccaccacatgtcatcctctcctcttcctcgacctcctctttctcctccgctcccttctacggcctttccctctcatgctcgtcattttcaccttcttcctagctatagagaatcgatatgttgacaggcataggcggcgacagagcgggtcgtcaacaatagatctagaggtctaggccccctcccccgttggattcggccgaggtgtacgtcagtgatgagggcagcagatgacaccaatcctgtggcctcctcttctgtctcatgtttgaggcatggcagcgcccaccaaatcaagttcccacatcgaaaaggccaaggagagaagaggttgtcgagaaggacaccaatcaacggggctcttcctcctaagcattgtcgatggtgatgaaggagaaggcaaacaaagctgctggatctggagccctatttg

SEQ ID NO: 51773 - DNA, 1101 bp, Oryza sativa
acgtgttgtaaaccaacgcgcctattagcggatcaccggatccgttccctgtccctcccacagcaatagagacgtgagatgatgtacaacacccgcgcccatccctttgtcttcaagaacattgcagaagtagacaatgaacacatatatagggtggagctctctcttcattatagatctcatctggagtacaagccagccattaaccattagatgtcacaccctgcccctgtatatatagaggtcttacgaggagataaacattatctctactccggttcagattggcccacaagaaacttatccccaagatatttgtttcacaacactttgttctggtccccgattcccgtatccattcggccccgttgcctttgcattcgccattggatttcagaatccgaatcccgtctccttcctttcactctgtctcaacacaatctatacctctttctttctcggtctctccagtaccctactctgccctgttcttttcttcttctctctctctgctctgcctctgtcttgttttgctttgcttcttctcgatgccatcgatgcctgcatgactgcttgcacctagcaacttcctcttgccaagaacgggcggtcgcagcaagtaagttagcctatctagcaacttcctcttctccattactccctactcctttctgtttgtttcattgctttcttccttcctaatactggagttgtactagtctatttccatctcaacatgcatgattcccagagagttctttgcttaggttcacctaccgattaatttcttggatactagctgctactcgtattatatacagagtagtttgttgattcttctcacacaaaaaaccttacctgctactagctactagcttcttctggtgtggtgtttaactgtttatagagtgtccttgacgtattctgatagctccacctgtcggcttgaaatttctagaggaaactagcttaggtgtcacctgttgctgcttcctactaacatgaagtctctagaccaaaagaaaaaaagaggagagtatactagtcattttgctctatcaattttactatttacgtgatcacacaggctctccatacaaa

SEQ ID NO: 51774 - DNA, 628 bp, Oryza sativa
caaaagaagtggtttgttatctctcaccttttcccttcaacctattgtgcttgtggtcatcgaccagttgtggcaaaacactgttattctagctagttggatgtgatatatcctaaattatgaacatagcctaaaatatgtcatattcacctaaaattccttatgttttgggacggatgaatatctcaaagtattggagtactgcaattactgaacagggagggaacaccattacaccaagcaataagataacagggaaggaacaaaatgtgcatgccattttggtttgctacgtacgtacgggtacagtgagttcgtcgtcgtcgtcgtggtggcggcggcggaaggaatgaaggcggcaaccaataagatcgcgatccagcacggaggcccggatacttactatgggcttaattccacttactaggcctggatccttaaaccttgggctgtcaagtgggcccggcccatataaatttcattctcagaactaaaagttaacccatctccctccaaaaaagaaagaaagaaaagcgcaaccagctgtgtctcctcggcccaaaaccctagctagcaccctcctcctcctcctctgccgccgactacggtgatggggaagcgcgcgcgc

SEQ ID NO: 51775 - DNA, 1464 bp, Oryza sativa
atgcaaagatcaaatcacccgtccagtcagtagagggttagtatatatatgtaaagtctacatagaagagtagaaaagtattaataaggattcagtggctgcaaatattttgaattcttgaatcatatagacaaatatgggtaacgagacactcttatttgagtctaataattgtgcctaatattttctcagatgattatcagtttgcagatccaacttgttgaaaaggcttagcagctttgacaaaggttcatgtagaccagttactgggaaagggtcttcagtcttatgcacaattaccgagcaaatcaacaaagttatgagaaatgtgaaaaaaaataaacttcttatgagctgtattttatagctcaacagtactgccagtacttctgtgtaagattgactggataatggctgcaatttaaggtcaaattttacatcaattaagcatttcacccagatcaagaccagtcctataaatctggtcttgatctgggtgaaatgctggaaaaatatttggcccataaatctgaaacaatgttggcccagttttagatggctatcggtatttcgaatacaaagtccagctatgttggctttacagggaacaagtccgaacgtaaattatgcagttaacccacaataataaacatacaagtgtattactatggtttccccaaaaagtggcctgtaaaatgccatggaacatatagtattcaccatttgggaaagcgaaaataaacagatagttgatatgtatgactgatagcatatgttcatataaacaccgatagcacaccttgtacatattaacaatagcagaaacaataggtcaaactgtctttaccatcactgcatgggaccaacgaaaatggatttccagattgaaactacaaagcggtctttttgtttgaagctatgggaccaaaagcccagtgttctcgatgcaactgtatgatgaactgacaataatcagataatgcagttacatatgaaactacaaattaagagctcacctcgtcgatcggcactgtcaatcagtctatgacacaagtactgctccagttatctccttcctagctatcctgcacctcggcagcgaactgcaggcatatctacatgatcatgacctttgaaatgcagcgatgctattagtataactttatactgagattttggagtcttttcatcaaccgattaacaattgcaatatacaagtagaaaatcatgcttatttacctttagaacaacggtcatgagccactgaattaaattttctgaacctctcttccaatcttccaaatttttttctattttggcttctctctggttttaactttttatttctctttccatccctcaatttttttttatgctccttcccctcccttaagggtggagctcgtgactcccatcctctcgcgcacgctgcgtagtcgtctcccagccacaccatacaagctg

SEQ ID NO: 51776 - DNA, 1350 bp, Oryza sativa
acgacttagccgtctgcgttcatagagataagtatatgcgtgttatgagtgtttacgttttattatgtttctaaaaagaaaggtagccggatatatttatactctaaaatgggtagagtaaatatgaattttatgttctttcaaacaaaaaggaaaatgattaattaattactccgtggctccgtgacgtgcacggcagtttgtatgtagtgtaaaatttgtgctaattagctcgcgcctcaagatgataacgtagctaataaggtacagtaatttgtcgaagactgagaaattaccattaaaaaaagagctctgtctcttttctaatactctaccatatatactgggcatctagtacacatagcctgtacagatgtactctctgcgctatatttactgatacaacaaaaatatgtagaaaaatatagtactagtacctgtactctataaaggtacgtactgtacaagcttgcaatagaaaaaaagacgaaaagaaagaatcagacgctcctctgctgtgcagtgtactgcatctagttacaataactactgtagaaattttccttgagaaaaaccaatggaaaacagggagatcttggtacgttatactgccccaatagtacacactacggtatgtatacttacctacgtggcgcattctgggccattgagttatcagccatagaggatcggacggaccacctgaagtggcagctagccatcaaatgcgcacacaggtaaatgaatgataggccttttttacaaccaattttgcagggagaggcagctatagctgttgcatcatgtgctagctcgtatgggtctcatcctgcattacacccatcactcgtagctgcaccttccctgcaactcaactgaatatatggagtacacttgttgcagaactgaaacatgcacgcaaagttgcacagacaatcacgcaaaccagagaacaacaccaccaccaccaacaacaataataataaaagtatgtggtttagcgtctgtgtttataatgtatatataaaaaatttatgtgcgcatttattttgaaaatctaacttatgaaaaaagagttcaaaagaagtatttctccaaggtttattagaggtagatatggagggaatggcttgtgtggtctttggcagactgcaggattattgatattttgcattatcatggaacatgctcatgaattggttaggtcagcatttacttcgttcttgtagggtagcaagttaaggccatgcccataacgtatcaatcaacgacatgcatgcaaggtggttcatgaatgaatacatttatacatgcatggtttcatgcacatagatgcatggagtatacagt

SEQ ID NO: 51777 - DNA, 1142 bp, Oryza sativa
caagcaatgtacacacattgcatatccattccatgctcaaatgattatcccataattaccttcctatagcaacaggtaaaaggaaacaagaagcaaacataaaattcttaagctcagtttgattttagaggaagagaatgtatgctatgcatgaactatatatacagtatgtgtactgcttgtgcactaggctcaacacacaactcgtccaatgtacatagctgtacactgctggtagcttctacagggaatcaacggctagatggaattaagaagattaaatttatcatacatgcttggcagggaaaaacacatcaatcgatcgatcgacagggcatttaaaacaatacatggatgtgcctaaatcatgttcatcaatgtagcattcacgaacaatccagtggatgtttgtagtacagtcataaaaagagactggctcccacagctggaactgcatgcctttagaacatcatcgatcgtgcattatgtacatatacgtgtttctttttctttattgccaaatggtagtacagtacacattgagtagcttgttgtgtggcttaaaatatcactcaaatattgaaattttacaatagaaactttgcaaccctggccatgtgactaacgatagaggttacactgggaatgtaaattcatttatattatctaaatagatgttttaaggaggtctccatttattgaatccatctaagcatttctaagcgttaaattttctagtgtaatggatcatatgtatattaccaccttaactactggcagtggcgaagctatactgttcttggggggtgcacatgaaccccccaaatttctaatttctcactcaaaaacagtagaatgtacagtgttgttttgaaattttctagattctcaatggtagtgcacccctcttgttttgatgctagcttcgcccctgcagtggcgaagctatactgttcttgggggtgcacatgaaccccccaaatttctaatttctcactcaaaaacagtagaatgtatagtgttgttctgaaattttctagattctcaatggtagtgcacccctcttgttttgatgctagcttcgcccctgactactggtagctatatatatatggtactccctcggtactggtaaaggaagt

SEQ ID NO: 51778 - DNA, 818 bp, Oryza sativa
agcatcatgcgccgcgcggccgcggtgaaacgaagaaacgtgcgccgtgcgcgccgcgagaccgcgcgcggcgtaaccgaggccagcgtacagccagccacgcgccgcgcgccgcgcgcggcgacggcacgagcgggcggctgcgcggtggcgcacgggcggtttgacctccacgctcgcggcgcgggcagcgactgcaactgcacggcccgccgcggctaagtccactcaccgtgccgtgcgtgatggatggatatactccactttgcctgtacaagtgcggctaaggccattctcaacccatgacactagacatagtttctgtaagctccacatcatcaagaaattagtactagacactactattccaatgtaaatatcactaatccatacttcaattaatgccacttatctcacatgatgtcttgaatgttgtgtagaaaccatgtgtcatgcaagatatgttttccttctcattcctcatttattcacttgctacatcatttttcattttaggtggcagcttatttaatgctatagacaccattctagtcattgggttgagaatggcctaaggccttgtttagggcctgtttagtttatgaaaagaaaaattttggatgccacatcggatgtctgaagggttttttcggacacgaatgaaaaaaaataatttcataacttgcatggaaaccgcgagacgaatcttttgagcctaattaatccgttattagcacatgtggattagtatagcacttatagctaatcatggactaattaggcccaaaatattcgtctcacgatttcctccctaacta

SEQ ID NO: 51779 - DNA, 594 bp, Oryza sativa
cctgtatactgtctagaaaatactttgtaggaaatctttaatctcatgcggcaattgtaggtcttttttgaaacaggctacttcctccattttatataataagactttctagcattgcccgtattcatatatatgttaatgaatctagacatatatgtgtgtctagattcattaacatctatatgaatgtaggcaatgctagaaagtcttataacctaaaacggaggtagtatatttctgctagttgtgtcaaatcttccatgtaaagtcatgatagccaaaacatgtcactggtatatttcaattttttttctgtgtccactcatttcctgttatgatcttaagggcagtgcttgtctgatgttctatgccatatactgagcgaaaactatttagttatgtcaaataaaagtgcagcaactacatctgtgaattctgtttaccttttttttttttaaaaaaagtagggagacatgttggtcaaatttagaaaaactctatttggagaaatatagaaaatatttatcccatcataaataggacaccggtgcatcctgtgtaattttagtttcgttatcttctctctttagtccc

SEQ ID NO: 51780 - DNA, 1455 bp, Oryza sativa
attggaaatggtaggttgcagcaatgaatcatcagcatttccaacttcaatttcttcttcacactgtgatacatcattaggtctgcccaatatcacagaagtaccatctggtgcaaagtttttatcatcctccaatgagtgaaatggtttttcaataaaatcattgctttcgatagaggaacctgacatcacatgacaataactatgtaggtaaaaataaatataagaacaataaataaaaaaaactaatgatgtttttatcatcctccaacagagggatcatatttttgtataaaaaactagatacttagaatgtaagaattaccatccaagccactagatttctgggatgactgtttatcagaactatgggcaatcacagcatgatgatcattggacaaagatgcctcctggtattgttgaaaaccattcatattaccattggtcctaaaaacatcattgtcgtcagagaatacactggatgatgagctgacatccatttccattaggtcaacatcattagaaggctcttcatcattggtgcaatcaacaccactgaaatttgtattagaagatattgcatggtttggttctccaccattgtatgaatcattcaaccatggtgatgagtctattacatgacctagttctgaaaactctgtgtgccgttcattttcaccttcatcgcggtgaaagttcaattcatccaattccatcttggcaccagggtccttttttattttcatctcagcatgtgcttcaccctctgattccatgttattaagagcgtccacgaagttctcctgatcactaccagtgtcatcaggtctgcagcgatcatcattttgatcagcagggaccatagctgatagaagattctcttcctgcactgactgcatcctatcagagttggagagcatggcattttgttccacaagagatctcttacagacgtcttccactttgtcaggttcatgctgtgtagcctgtaattgcctatcatctgcctccagggcctccaggcaatctgaaccattaatgtgtgtaggtgcgatccccttggtatcaaactcgtttattggaacaaccttagtcagttcaagtttagcagaagattgagcacgagcactgaaattatctatttctccaaatgaggatgccgtttcacttgactcagttaatctaaactttggatggtagtacctcgaagaatagttggagaagatcttttgttgtgatgagattatttcttgcagatgctctctgcatattctgctaatgttcttatgatcagactcccgaggatacctgtatttcaactttgttgtccttggtggaacttttctagatgatcgatcctttgaggtagtgtgggatctgccgatttttacacaaaatgatattgtatcactacatgatttttgtgattattatgtacatgaccaatcaaaatgc

SEQ ID NO: 51781 - DNA, 813 bp, Oryza sativa
atccaggcccgtcgtttacacgtactctcccagtctcatgaaaaacaaactttgtacgaaagtgaatactagcttttaagccgttgtaaacatttaaattttaaaagttgattttagaattaattctgatgttttttttttcttcttcatagtttgatttttgagttaatttcactttggatcttattttgctgttaaagtttcattttagaccatcatttatcctttttttaaaactattttactatgtaactttacttttcttgcataatggaccgtctcaaaccacatcttcagcacttcaatgatctcgagcacatcgttaacaacatgccggtcaactttcctacatatacgcttgtcatagctttgcctaaggaaacgcgagacataattagtgaatagagttaagatggtccattatgcaataaagataaaagttaactagttcaaactgaaaaatattatgtatatgatggtccaaagtgaagttttaccaataaacatggtctaaagtacacttcacttttgtttttatcatttgcttctaaatggttgaggacatagatataagaattttaactggcaattttttttttttgctgacacatgagatctattcttcacctgctatgcttttgtacttcctccgactaagagtgtgtttagttcacgtcaaaattagaagtttagttgaaagtggaacgatctgatgaaaaaattggaagtttatgtgtgtagccatgccttgatgtgatgaaaaagttaaaagtttaaaaaaaaaagtttaggactaaacaaggcctaaaatga

SEQ ID NO: 51782 - DNA, 701 bp, Oryza sativa
tcgggagattgtggtcagagatgtaagccgctttcaccattttaaagatggcagatgctcttgtcgtgattattggtgattgggaacaaagcatggtaggaatttcttttgcatcttctgaggggaacaacatcaacataccttacctggtttttgaactatctgaagcaatcagctgcagttgatgcccagcagtcataactaaggctcaacgggtgccacactctttactgccagctggcggtggtacaactaacaactcagatcggctagtatgcacacttgaatgaaccctaagatgcgaatgctcaatggtgtttggtttgtacttgtctaatggcccatgtacatacatgatggcttggttcccatgtaatgcaatgctatgggagaattcatctgttttcaccagatatctgccttattaacttctagaccagcgatgggagattgggtcttcaccaggtaccaaagaaccatgttccgatgttatatttcaaacaacagtatcaatactttgcattcttgctgataccaatctattaaatgaacagagataccacaaactaatctggaaagagcgcaactcgagaatctttgaacacaaagattgcactgcagcgcaagtttacagagcccttagagatgaagtgctgatttggagggaagctggagtgtttaagcatagagagtagtgtgtg

SEQ ID NO: 51783 - DNA, 1527 bp, Oryza sativa
gtgggaatctatacccagtccaattagacaatttcctgccatggctaacaaagctcctttcaaccatatagaaacctgtaaaggcattggtatttggtaagagtgttaacttgcaaggggtgattggttgggagaggtttagaagcatagcataaaagccactatccatgtctcttagcttctttcaataggtaggcttgaacttctcaaaaagttgtatggagatatttggctggacactattgaattgtcactctgaattgcattgatttgattgtatcattattttgaattggttctttcatatcctatttcagggttccctacaacatatggcaattctgaggcaacatatccagcacctgcagcatatggtaactctgagacaacatatgcaccaacgtatggtaatactgaggcagcatatgcatcaacatatggaagttctgaggcagcatatgcagcagcatatggaaattctgatgcttatagcactaatcaggttggttacattcccttatcattgttctcttgtttcatttctggtgtcaagtatatctttttgctttcattgttatgcatgtcaaaggatacgcactcaaggactgaaatccattattacttgaacagatgtattttagttagtagtttgaatatttgctcctctttttatttcactgttggtcttgaaatgattcgttgtgccatgtattgtttctgaagttttccacccctccataaggaattcaacgaaatatgtctttttagtgaaggaaaacatggatggtagcccattgtattctataacctataggtgtaactcttttacatcttcccctgtcaacgtcaacagcattaggtatttacaagctacattttgtggtctatgctataggttaattagtatgggtaccacttgctctaaactgtaaagtgtaaacatatgctctgttctattagggactaatagttcctggtgagggaaaaccattaaagcttctctcccttaattgttggatcatgggtgtattttgaatttggtttctgttccaggcttgaaaataccaaattatgctccaacttcctagtgcctctatatattattagtgattgctgtgtcttctttatcacaggctcatacccgcaccgatggcaatcctcattacatggctccacctgttcattatgcgcagtatgacagccagcacaccaatgtgcaaagatgaatgatgagtcagggtagctttgaccttgggtgtaatcctggcatttgtcaatgtagttgctgggttcaccaaatttaaggttatctgcaggaattcattccatggaagtgatggatacactgtttttcccctatcttttcattaaccagttccggaatgctcgagccagttgcctgaagtcaaaatctttctgcaaattgtcgatgtatcaccctgatgaaccatggattagtgagaccgcagctcagtctttttagtcagggattgtgattattcgcaaatgtagtgctgcagcattttc

SEQ ID NO: 51784 - DNA, 978 bp, Oryza sativa
caaaagtgaatttaaatgtgtccttcctataaacattctagtcctccaaatacattttagtgtccaaagctaaatttaaatttctgtcctccttaaagtatttatgtccaaacctataattaaaattttgtcctacttaagtcctccataattattttattgtgcgatgctgtcctgtttttcaaatcaggcgactcttacggttttctaaaaatcaggagacgcttaggcctctttgaatggcagggtagaaagaacggaggaataagaaaaacgcaggattcaaaacggaggaataagaaacacacaggattctgatagtaattgaagtataaaacagaggattgcaaaacacaagaatgatcgtttgattggagcgtaggaaaaacgcagaaattagatgagagagatagactcaaaggaaattttccaagaggttggagctcttgctaaatttcctccaaaatccacatacaaggaatttcataagatttagaaagcttcaatcttttgaatcaaagggccaaatagaaaaagattcctataggatttaaatcatatgaaattcctaaataaatcctttgattcaaatgggcccttaggctgcgttcgcttgggtgtgatatagggtgagaaagcacctcgttttccacgcgcacgcttcccaaactattaaacggtgtattttttataaaaattttttataggaaagttgctttaaaaaaatcatattaattcatttttaaaatttaaaatagttaatactcaattaatcatgcgctaatagctcacatcgttttacgtatcttcccaatctcctgatctctttctcctcaaacacacccttagatttcgttggtcggtttgagccgtttcaaatctggtcttccagcgcgacgctgcccgcctcgccatccacctccacgtggcggggtgacgtgtcactccgaccctttatcaaaagtcgccatccgatat

SEQ ID NO: 51785 - DNA, 609 bp, Oryza sativa
gatggtaatattgtattgtattagtgtataaaaatgcctatgtatgttcaatatatgtgtgtgtatatacttcacattttagattaaaaaaacccttaaaaccactttaaaggtcgctttccgcttaagcactacaagttgtagtgaccgcaccacaccgcttaccgcttttagaaccttgctcccagctgatgcagaattctggtgtagggttgttggatcatttaggacgtgtcttgagccccaattctggtactaccttttcacacattcacaaagctcaccagtcagcaagctttctctgagatattttatgtcatttgaacaatgccaatgcattgtgatggttctcaaataaatacaccggaagttctgagtttaagaaaagaaaaagaaaaccctctagtctagataatttcccaaatggcctcggttaggggatttccaggtaaggatcatagtgtgtagctgaggctggtgggatgggagggagggagtcctgctctcaagcttgtggagaagccatgatggctggcacaccagccgtgtggggcacaccctttgctgtgcgcctaccactgtaggtgtggacccacatgacgcaaatat

SEQ ID NO: 51786 - DNA, 620 bp, Oryza sativa
tgagaaaaaagcgatccatcttgccgctctgtttctcgactactgaggtctgaggttttattactactacagccgtaggtacagcatacagtaagctgtttggccggacaggcatgatgatctctagtgagaatgtgatgacaatgcaattcaaaacaaaatgatgcatgccatgatgcaatgcactcatcttaggattaagggagatagaagaggatctggggacgaggggttgaggcaaatacttttagtagaagaagtattacttggaccatttttttttatcatcctttacccaatgtttcactggtggagaaaccgtttgtagtcccggttggtaaccccctcttagtcccggttgtccaactgggactataaatccgggactaaagatagctatctttagtccctagtgaaataaccgggattaaagatcgatcagctacatggccggccaaaccatctttagtcccggtttgtgttaccaaccgggagtaaagatcggtgcaccatttttttttcatggccctgtttgctgcatggctagttatatatatacatgtgtgtgtgtgtaaatcatatattacacacatatgtataatttaaagcacttaacattt

SEQ ID NO: 51787 - DNA, 662 bp, Oryza sativa
atcacatatgttttgattgaattagttaagtactagtcggaatcattactccatgttttcgattgcagtagtactggtcttaatgatcacattatgttttcgaggggccttagtactagtcgtaatcaactaatcatcacaatgtatcacgatgtaatcgtataggactctaattgctcacaatatctctgtaatcatcattagggtagcatatgcaacgaaaatcgcatcacaaatagtatataggtatatcgcagttttatcgtcatgaatcttgatgttgtgtaccagagggtcaattcaaaaaaaaaatgttgtgtactccgtacatgaatgaggtaagtagataagaccgccatagacacacacacagagtaggagtacagtacgacctaccggccggtagccggtagatggagggatcagttgtgtggaccaaacagtaactgcacactgtggcccggtagatgtagatcagtgtcgtacgtaataatgtacattggcaacttggcatcgccagttcgccggcccccaagtggtccatcggtagcatgcagcagcgcatgcaacgggtccatcgctttcgatcaatcgatcaatgagttgctgcacaatgagttcgctgcacgccatgctgctggtcgtggcggtggtacacatga

SEQ ID NO: 51788 - DNA, 727 bp, Oryza sativa
atgaataactctaaagttgttgaatttgagaatgtaaaaattatatgaatagatttgtcttgaaaaatactttcataaaagtatacatatattattttttaataaatatttttatagaaacaagaagtcaatgttatattttggagatcgtgtcgctgtccaaaacgacttcctttatgagtacggagggagtacaaaaaattaacgattcagataacttgtacttgtaataataccgacgtagaatatagaccaccacaaaggtaccctatctaacagaattgcggaaacattggtttatacacctatctacgagtcaattattagaaaaagaaaatgtgttatgatgctacacacatgaagatcgagatcaatcacaaatgcattgttagcgctagggtatggccacagaggtatggattcgcaagagatctgatctgagtggttggtacaagatatctcctgatcaggggcacctcttcatggcaaatgtcagatgacgatctccagctttccgtggggaattaaagctggctggctggctggctatggtgcatccatcgttgttggcttcttttcctcggcatccatctcattcaaggtatccatcgtcgtacgtacactgccttaagcccaatgctcaaccacaccttgcatatatcttctgcatattaattacctagctctagcaacaagctaggttaattcatgtgtagttgtggattaa

SEQ ID NO: 51789 - DNA, 556 bp, Oryza sativa
cgtgttggatcccacaggagttttaatgctgcctgccattatggctcgtcgcgcccggtgccctgaaaaatgaaaaaaagttgaagtggagggcaatggaattgtctggtgcacgccagtgtgcatgcaatgcacatatggttcgttgctgattggccactggtgtaacgtagcctaactaatcttacccggtgcacttttccgcgttgttgttgctgttgttgattcctgattgtggctgtcaaatccaacgtgcacggtctggaccgtgctccctctcccggctgcgcgcttggctggtggcctcaaatggctaaactatccaacaagagggtacggttgttcccttttttacgataaagaaaacctgttctgcgatgaagatatttataagtttatttggttttagctactagtacaataagatatgaatggccatgtgtcccatacactatacactgtctgttttaggaatacatcttataatacttattatactagtaaattatatggtgttaaatattgctatgtatattataaaaaggtttcattattg

SEQ ID NO: 51790 - DNA, 679 bp, Oryza sativa
atgtttgggcatccgcaaaaccttatggtatcttagagtttgttagagataagagtcgtgtctgatatggacatattttgtaatctcgggtataaatagaccccgcaccccatgtaatcaaactaacacacgttcaatataatctcggcgcatcgccacccttttacttttgttttgtttcgacgagttcttactttcgggttgagctacatcggttccgatcttcaactagaggtaaaacttgttatggcggcttgcgttctcaggattagtacttccatctttatgatactctaatctcgtttatgtaattcgtcgagttatcatatatcttatataatttctggcaatatcactatctaacttctaatcggctaacgtctgttactagaaagcagccgattaggttaaatatcgacgttgacttaaattatataggatatctaccactctatgaaacatccaacggcttgattgtctagatattgtccttcttttcatacttatagctgcatcagttgagtttgatcttatgagtcatgattagaatctcaatctctagcctgtctttggttgccgattagggtagtatcggggtttcagccgatctcacctgatttaactacatttttcttatatgcttgattcacatgttaaatctgccatttatgttacgatc

SEQ ID NO: 51791 - DNA, 702 bp, Oryza sativa
tcaggtcagaccacagatcttcgtctacctcggcggctaccgcttcccccgaccaggtccccgactttgtcatcgccggcaactactacggcggcgcatgcactgtcttcgccggcaactcgaactccgacgccgacgccgccattgctcaggtgagctaattaacatctcaaaattcatcaagcagatcattggtgatcgattttattgggaaagcaatttcatccctcatccctcatcaaacaatatgaaaaattagcaacatagattgatatgaaatatatcactccacaaacatacaagtttgaattcaacttctacaagttaacaaaaataacaaatatagttgtgaatgtgcgataactattttcagtttaatttgttatttttgttgcaacttgtagaaattgaatttggtcttgcatttcttgtggactgatatattctgtattaatctatgcttttatttttttaatttttttataactatttagataacatgcaaacaatgagaggatgtcccctcgagggatgaaaatccatatccgattttattaacatttttgtttgttgaatttgatgctgtagatcactcgtccaaatttggcgggtacattggtgggattgacgaggtctgtgtatacggctaggatcaacccggggatagaccaggcgttcatcctgtcgctcgttgtgattctg

SEQ ID NO: 51792 - DNA, 690 bp, Oryza sativa
gcaagctgcctatacttactgttactgcaatatatgccaatacatgggtgcccatggccatctatgcatgatgcatcatcagatcaactacttggatggatcctgccctaataaaagtggctagtgtcaccacttggtaccacaactccaggcctcatttcatctttctccatccatgtaccatttttgatcccgtatcaagaacaaggtgacaaatgctagagacaagggcattggccatatgcatcaaatgaaaaatctggtacagttgctagctagagctagctagcatgcatgcaaagatatctgacactaaatcattctcatcaatgtaatccctgtgacctatcaccaacatgcatatatatacatacttgtatatataaactcttgtactgactgaatacatcagttgaatattttgcaaatttcggccaagtctacgtcaaattaactgctgcactatatagcagtatacatcgaacagtatgtggctatgtgctactgtgttatccaacatatctagtcaacatatatactagaagcgatgtgcgtccttcaattcatagaaaaaagaaaaaagaaacttccaacaagcagggaactgttcaaaagaaactgtactgtattatatactagtatttctgattctgaaagtctgaaacgcatttgtaaaaccagaaactgttt

SEQ ID NO: 51793 - DNA, 858 bp, Oryza sativa
aacgaatctggacataagacaggatgagacacatcctagaacaacgaatctggacatgaggcatgataaaacacatcctagaacaacgaatctggacatgaggcatgataaaacacatcctagaacaacgaatctggacatgacgatgtgtctcatcctatcctagattgctatattttgggacagatcgagtgtagatttttttcggatggagggatatttaataattactctctaaaaaaatcaacctagtataagattggaacaaatctagattatgtcttattctataataggttagatttttttaagtagggagggagtgcttctagtcctactcaaggtgattggtgttagggtttaccttcccgttttaagtgaaaatagctctcaccggtttacccaagacagagcaaattagtcgataaaaaccagcatcttattgttaaatccatatcaaaagttcaaaacccgctaaaactgtttagtttttacaaactgaccatcaacggtttcatgaaaaccgagcgacagttttcaacttctagtggattgtgatacaactgatccaactcggtaataaaatgtcaggttgaagattaaaaaaaaaaccagtgacagttttgttaaccctgatttatgcagcaaaacataaaagaataaagttaatgtgagaatgaaatgaatctataatcgcctgaatatactttgtgttcacaagaaaaggtagcagttaagtttcatgtttctcagcctttcgggctaaaaaaaaagtttcatgttttctgaatttcagatgcatcacatcagtgcaaaaagtttcagatcattaacgaatctgctgctccattatttaat

SEQ ID NO: 51794 - DNA, 3640 bp, Oryza sativa
aacgagctgctctactggaagctcttcttccccgcgcgcgacgaggcgatctgacctcatgacgtcacgccgccgccatcgtcgtcgtcgtcgtcgtcactaatcggtgtaatctgctccgttcccgccatttcttttcttggcgatcgatgtaatcaaatctctctatacttgctcctcttctctcctcttctctttttgaacgaagtgaaaatacagaagctagcattatttgcttgcatgtgtacaaaatccacgatcttgcatcaagattaactaatgtgatcaccaattcaggatcactctgttgagcaagaacctggagttgcacagatgtttttggatctcacatccagaattggaggttgccttttgatgggccgaaattacaaaaacaaggcgggcttatgaggcccaattatagagattatttgggccataacgagaggggtcggaaactaaaaatccgaatccctaataaacgaggtcaattttcttcgaatgcgcgtgccactatatcgatgcaattttttttattcacgccatactttttttgtttggaataattgttatcagttgcttcttaattgcgggaagcaagaactctggtcaattcatggtagaactcaccaactctctctagtctccaccttactgtctagtggctgctgcagtgtctcgtcagataatgagataaacatgtttaatgctggaaaaaaatatcatgaaattagaggagttacagacgcctatctggttatctgaagactctgatttttaagctgttcagccgggtattcgacagttatatgatctcttctccaaagtccaaactgatgctgacttcgggcagacaacaagaactgtttatgtcgatggcatgaacggtagtaggttacatctcctctccgtgggttttattgtcaccatcatttcgtgatgtgattcagttaagatcgagtatagtagatcgatatgatatgaacaacgggatgccttcttctgaacttttgtgttcagcaagtttttctggcctccatttagaaggaaaaggaagatatccatctattctatttgattcaggtttcagttgtgcagtcaagttagaattgtttgtttgtggggcgcttgctctagtgctgatcaatgtcataagtacaaccttgacaaatttgcttgagaagtcggaatacagataggccaaaacatattcatccattctgaaaacaacctgttccaaccgtagtctgtcaggctggcatacatatataccagttcagaactccatagttagtccttcagataagacaaatttattcatcagagtttaagcaaacaccaacagatcagagttttgctactgaaattaaagtaaattaaacaaatgcaatccagggattgctatcagaaaaggaaaacccaattagatttcagtaaggtcaagcgaggatagtgtgctcatgaaataggttttgtgaggcccaaatctatagattttatttgggccgttttgaaatgcagttaatgtttaagacgctcattcttggatttggaggttaaatttatctcatttttttcctcaatcagataaaagtattatgcttcatttttccaaccttaatttagtactatgtgctggacaactaaaaggagttgcaacttacaaacacctatatctggctgtttcaagagtctgattctctgctcctatcacttttcgagaattagtagtatgcagaaagatgaccttacaggctggagaaggaacttctatctcatgaaattcagttgagtattcgacagttatgtgctatctgctaccaagtgtccaagtcccaagtaatgtcgatttcagcagacaagaacaactgttcaggtctatgttatgcaacgggtaggttatacaccctctctctatgggtttgatggtcaatatcatctcgtgaacttttgtgttcgttaagtttttctttcctcagacttagaagcgaagtaagacatcaaattgtttgatttgattaaggtttcagttctatcgcccaccaacagtcgctattcgcatgctcgtttatgctccccctcccaacgttttgcgctatcccttatcataagttcccccttgacccttttgctctgagaactcccgaattaatacaccacacgcctgctcgtctggtccattgcaacatattggcgtcactcattctgagaaaaaacacctgctccccagtgccacactactccggcattcccgctgacatgcgtacacttctttggaacttcagagttttaagcaacatcaacagaagagagaaatacgtaaggagtatttgaaattagactgtcagttgtgctaatgaaagtaacttacaaaagtgataagaaagaaagaactgaaagagcacattttcagggtactagtgtgtacctgacaaaaggcgtgaccaactgttcctctaactagtcggatatgacactccacagacataatccctgaaaaccaaacttaaagtttcattagtagctctattaatctaatcaatctctgtagttagcactagtttgtagggcaagtatgtgtactattgacctttgttagaatcatggaaccttcaccaaacgatgttggtaattggtcatctgctccacatatatactactcctacttgccccaattcccgcaaaaacctttacttgcaagacatcaagaaattaattttcactttacaaatcaagtacaacaccagtagtagtaatcaacagattttcttcagacagaaagctaaataccctccatccaagggtgaaaacggtaatgtgaattccaaaacagtaacgaaaattttcggtcgaccgatattcgtttctgattttgtaccgaccgagccatatggaaatggtaatcgaccgaaataaaaatagaaatggtaaaaaaatataaataaaaattaaaatggttttgatgttgtaccgatcatttccgtatttactgtattcttgtggagattaccgtttcttataatatagtaattaccgtatttctaaatatgtcgatattatagagtatgtcgctattttacccgcaatttagagacaaattgactctttaattaaatccataacttgagtgcatggttaaaatagagttaatttgtaatttatatagtataaacttgaagttatttatatgtattacatagttacacaaagttaaatatattttttatagtttaatgttttcgtatttgttaccagttttcgatttgtaccgacatgtttccgtccatattattctgtttcccttttttatatttccgattttattttcgtttctaactttaccatttttaattccatttccaaaaaaaaaaaggttgagacgattttccaatcgtttccgaccgttttcatcccgactccatccaatccgctagttgtttagtcgtcagaatcacttctcagctattctccatcactacgatattagtactataattttttcaaatgtacaaatatgctatgtgccaatagtaatcaactttccgatcgtttcccggctccatccaatccactaattgtttattcttcagaatcacttctcaggtcttctccatcagtacgatattactactataatttc

SEQ ID NO: 51795 - DNA, 1293 bp, Oryza sativa
caatctacagtttgaaccagtcaatggagtagaaaaggaattattttgctgaaaaaagagagatgtgtgcccctgggttaggggcggagaggagcacggggcaggccacatggaagacgtcgtcgcagccggcgatggccgccgccacgctaccgtagtcgagcaggtcggccttgaacagccgcagcctctccgcggcgacgtccagagacaccaagtgggcgttcttcgcgtcgtctttgcacaaatcatccgcactagcacaccaatcaatcaatccaccagaacaagagcataacgccatgaatatcaaaaactttgatgcatatggaggggattggggaagtgggcagcggcggctgcgactgcgagctctagtcccgggccccgtcagcgccacgctgaccgtgtcccgcggctgtgagctcgccgtcgccgcaactcgtgcagatcgatgcggtggcgccggaggagggggggcgatgtcgtgcagctccggccgccgctctctcgcctgccgccgcgcgctcgccggcctacccgttccgctcgttggcctccccacctactccctctctacgcacgctcgccggcctccccacccgatggctggcgcccttctccctctccgcacgcgctcgccggccggctagggagctcgaggaaggatgaagaatggccgggagggagaagggacaaggacgacggcgcgggggagatagagagcagggtgggtcccactatttttaatgactgacacgtgggtccgaccttttattttgcttccaagtgccacatcaccaccacatacgatgaggactaagtcaaactagccacatcagcgtcacatcagtcaaaaccgccatctaaaccgctgagggacctcatctacatcggttttgacagttgagagacccatggtatctggtattgtgattcagggacgaaaatcggactcggtgtaaagttaaggcacctcatatgaacttattccctcaatatatcctgtacaacccagcaagcacaataaaaagaagatgaaatttgatccaactttttttccgagtcaggtacgtacggcgcagattcaaagatttgaaaatagtacagtacgcatttgaaattaatcacgtgtcctttgaggagcgagtacacttaaatttctcgttctcgatctgttcagtagtcaactgtacgagttgcagtaattattaatctatcactgcggattagtggaaacgaccacttcgatctatagaaacagacttttgttttcgaggagcctgcattgat

SEQ ID NO: 51796 - DNA, 1266 bp, Oryza sativa
agtaatccaacctgattttctttcggggtgacatgcggccatcatatctctcatgttaaatgcatagacaagactatcttatctaaaaaaaagggatgagtccaatacaaccaatattattctcaaaccaaacatgatgttaaacttcttgatttggactgttaatttacctgataatccctccatcccataaaaaacaaatctaggaccggatatgacatattatagtccaacagatttattgtactatagtatgtcacatccggtcctagattcgttttttatgggacggagggagtagagtagtatacatgtagtagtgttaggagtagtattagggtgtgtttagttctttgggtgtaaagtttttgaagtatacggacatacatttgaagtattaaatgcccagtaataacaaaacgaattacatattccgctcgtaaactgcgagacaatatttattaagcctaattaatctatcattagcaaatgtttactctagtatcacactgtcaaatcatggcgtaattaggctcaaaagattcgtctcgcaatttacatgtaaactgtgcaattgatttttttccccacatttaatgccccatgcatgtgtcaaacatttgatgtgatgtttttggccaattttttttatctaaacaaggccttaagctgtgtttagttcccttcaaactttcaacttttccgtcacatcaaatgtttggacacatgcatggagcattaaatgtgaaaaaaaaaccaattgcacaatttacatgtaaattacgagacgaatcttttgagcctaattacaccatgatttgacaatgtagtgctacagtaaacatttgccaatgatggattaattaggcttaatagatttgtctcacaatttacaagcgaaatttgtaatttgttttgttattagtctacgtttaatactttaaatgtatatccgtatactttaaaaactttacacccaaataactaaatttagtggcatgtgcaatgaatcagtcgtgcatgcactagaaactcgcaagttgaggccctaggaatcagtaaacctgacgagtttggccgctccaggagaggcatccatccatccatcagacttggcaacacgtagccggagctagctagcccaagtctatttcgtcgttgcatttgatcgtgtgtgtggccggagcccggagtagtacactgttcaagtcgaggagtagtgtgtgggagagagtagtctaggagtagctagctataggaagcgag

SEQ ID NO: 51797 - DNA, 1606 bp, Oryza sativa
  unsure (1)..(1606): unsure at all n locations
gtttctttatttctttagagaacaaagaatatagaaagcatttacgtgaaatacctcatcattactagtataataagtgtgctaaaaaagaccgaacaaataacccgtaagtactccggccccctactcttaaaagagatcgttttacctataaacattgctattatagaagtagccaattttaaaacaaaattaggtacaagtagcgatatattaggatgagggagtagatagcaaaaattcagtaaagaaaaacaaaagggggttaatttctagttttcagtctagtaaaacccctaaaatttaagccactttttagacggtcgagatcgagattcacacgtgaagagtgaaccttatatgctcatttgtttttctcctcccctcattcccgctcgcgcgggagagatcaagcgatccggtgccgccctccccctcccctagccctcctcttaccccaacgtccaccctcagaccctaaattctaaacctagtgcggcagtcacctattgcgccatcaccggagaagacattgtcactataagtcctggccgaccttccctctcttttctctctagagcttaaagatctattgccttctatgggctcttttgctggagcttaaagatgacttcttgaccggtagagagcaggtgagcgagatttttggagatcttanggctggtttggtcttgccacgttttaccaacgtaagcttaggcatgcaacgagtacttaggttacttggagttggcttttctactaaccataggcttgctataacttgatatgcatgtttctgcatgctcgttgtgtcttttttcccccaaattttatagtgttccgtcacaaatacggtaactatcttaccttagacatggcaactttaggggttgtatggtttgtaaccacacgttgctatgctttgccacacctcaacttaggtagctctgactaagttagctatgcgtttggttcatttctacacttgcggtgagattctttttctatcactttggtctcacacatcatcgtcttagaaaagtgtgataaggtcgtggattgctagccaaagtgtatcgaatttgttcgcctaaccttagacaagccgaaaaaaaaaactatagtaacccttggcaatattactatgtgaacaaaacaaccccttaatcaactgagatgctgagaactataggagcagcaaattggttaaaacaaatttgtagtgaagccattttttcatatggagagctgttcaacagttcaggtgtacagcagctagtactgctactagcttgctaatgcttttatcagtgtactgctcgtactagctgtggagtaaaaaagaaaacagctggctggtttactaggacaggtggtcaacggaggtggcagcagctacaactccataggagcaggcacaataccaggctataagggcaagtgctatggtaaatgtgactaacacctccaaatttatctattttattcacttaccaactaacagtcaacccatacaatgtatcacctctaacacacaaataccaatatcttggatactttaacacacttcttaaaatttgtgtggaggttgtctcttgattta

SEQ ID NO: 51798 - DNA, 1098 bp, Oryza sativa
gccactaattctagttaaaagttacatctaacctcacttccgatatactcctacacattaatcccaactcctcccccacctccacccaaccactttcacatctcacgtgagcaatgtactccctctgtcccataaaaacctaacatagtatgggatgggacacacgttaatactgggaatgtgaacagatgggtttaaaattatagtattagaatgtattatatatatctggtactaggtttgttttttataagactaagggattacctagtttgttttgcatgtatgaatgcgcctcctccctcaacgtccgcacgcgagattgctggcgaccgccatggctatcgttgccacaacaaaaatggtcatggcgctatcccatctttttatgcttccgtatcactctaaggagatttctctatgtcactatttttcttgacgtctcccatcacctaaccatttacccaaatgccctcacgtcccttcatctcaaccctctccccatcttcctcaccctgcatttaggttactggagccagaggggatgattgtggagcatgaatcgtgaagcaaagtcgaaggcaacaaaaccataaggatttgatcattttttgaatattttcagtcgcatgatattagcaaatccaaaaaaattattgtgttaatgtaccagtcgaaagtaaaacacgatctaccgaactgacagcaggcttgaaaaagggagcattgctaaggtccagtgagttatggagccattacagtgagggaagtactgatcatctctccaagaatgacctaaaacacgcatctgactccactagtctttgcaggttatcgtcatcaaccacagtgtgacaatatcctttaacttcatctctcatcagagtcaatatattgttcaaaactttatcagcctagcttatcatgtgtggtatgaccaagtactaattttttataggatatttgtctagtcaatgactgatgaatagtggaatatatactcttataaaagaaaataatagtggtaacatataatcttataaaatatagcaatagtggtgacagtaaatttgtcacccgtaaactctattttataat

SEQ ID NO: 51799 - DNA, 553 bp, Oryza sativa
tcattcatgaatagcactagtacttggttcgtggccacacgtccatatatattctactccctccattttataatataagtcattctagcattgtttatatttatatagatgttaataaatctagatataaacatatatatcgatttattaatatctgtatgtatatggacaatgctagaatgacttatattatgaggaaatactgtttttaaacaagtgtttggttctctgttactcatgttagagcatgttagcgtaccacatatactatttttagcgtgctccatgtgtgccaatagtcccggtttttcaagtcaattttgctgtcgaagttgtggtgccgtgcaccaatggaaagaaggatttgcagccaaatgtgtcattaccttagtattatccattcaactgcactatgactatcactcaataaaataatagttaatttgcaaggtcggagataaacttcaccagtgcaatagcaaacggtgagtggttttaatcctgagatttatgttcaatccctaacacccttacaatttctttttaaaaaagt

SEQ ID NO: 51800 - DNA, 996 bp, Oryza sativa
gagaaaattagcaccttgtgcccttcttccttaagtttttcctgccatgttttctatgtattatgcatgcaagattatcaatggataagcatacattgctctaaagaaaagcattgagtgcagaccaacaattgcagtataaatgtaagcttgcatgacttgagacaatttgatgtctttgtggtattctttgcaatcaaagcttcaagttttttgacaatgccctgtaacgtcctgttttctttcaacgctaattgttcctcacaggaatctacagctgtcaagttctgaggatggttgcatatcttttggagcagctgtttaaatgtaaacatgaaatatctcaatattatgaaaaaagatacaatccatctctaaggaaattactcgactagtgctacagaccatcaaggaccataagatcatgagagagcaccatacataacttaaaaaaggacgattaaagagaaatttcagaagtaccattgttgcaacaaatgttgatcccttcactgtcttatcaatcaaattgctcttcataatgtttcatataattatatctgcgtacacaagaaaagaggaataaataatgctaatacctgaatgtagctttttcatcaacgtaatttctacctgatatggcgttagcttcagccagatgacaagatcagctttattaggtaaaaggctttcaatactttccttggtgcgcctaagaaaataaggtcgcaccattttgcggaactcctgcaagcaacaaataataactgtatagaacaaataatacaagatgttttcggaaacaaaagcaaacgatgaaataggaaaatcccatggcctttttagaagatatcattactacttcagttgttgcctaaagcccatttcccatgtcaattggtttacaaaagtctctttcaaaagcacaagagagcccaagacagtaggacagcaaagactcattagtgaatgaaattcctgcctgtgacattttcc

SEQ ID NO: 51801 - DNA, 2341 bp, Oryza sativa
cattgccattacgtgtcgagatggcccagccgctgctccactcgacgctcgtccgccaggggagcttctcggccgccgcccttcttggtagcgaatgtgctggacggcatcgtcgtcaacggcaactccgacgacagagcggctgcgcacggtgagggaccaggcatgatgggggcgcggggcgagctgctttgaccgatggcttctttgtaggcgaggaactcattcctagttgagggacgagaaattctgcaaaaatacgaggacccacaccctctctcctccacatcatcatgcatcctacgtggaggcatgaagtaacttgtcagctggtgcactgtgaaaggcctcatgatagataggaaaagttacctgatactgactcctctttgtccagttgcctcgccatgcaggctctgttcagttttcttttctggtaaaccttgaggccccatttgattcaaaggaaattcataagaattttaggatttcttttctatagaaattttttcctatatagccatttgaatcaaaggactaaatcgtatagaatcccataaaattcctatggaatgcctaatgccattcaagttttagagaaaatctaatatgaagttctacctcatggaagctttccttcgagtatttatctctcctctaattcctatgttttttctacggtccaatcaaacggtcattcctgagtttttcctgtgttttgcaattctctattttacaatttacacttacattcatattaaaatcctgcgttttacctattcctacgttttctcaatccagcgattcaaaggggaccctgaatgacgagtttaagttcttggtggttgtggcaggtgttgaaaccaggaagttctgactactaacgctaaattttcttcatcagcaacagaagataaacccatctagatgcccaaccaaactagatgggtttcatatcataaaatgatcagagatgataagaacatgtttagttcattaccctaccaaaaattggtaggttgttaggctttattagataaggttgttaggaggtttgttaggctttattagataaggttgttagtaggggtgaaaacggtaacggtaattaccggccgaccggcgttcgttttcgactttctaccggccgagccatatggaaatggtaatcgaccaaaacaaaaatggaaatggtaaaaaatatggaaatgaaaacggaaatggttttgctgttataccgatcgtttccgtatttaccgtattcttgcggaaattaccgtttcttataatatggtaattaccgtattctaaatatgtcgatattataggacatgtctatacttgacccacagcttatagattgaatgactcttcaataaaatctctaacttttgtacatggctaaaatgaagttaatttataatttatatagtataagcttgaatttatgtatatatataacatacttatgtaaagttaaatatatgtttttatagtttaatgtttccgtatttgttaccagtttccgatctgtaccgacatgttttcgtccgtattgttccgtttccggttttccaatatttctgatatctttttcgtttccgactttaccgtttccgatttcgtttccgagaaaaatatggttacggaaatggttgaggctgttttccgatcgtttccgaccgttttcatccctaggtgttaggatgtttgttaggagccggctctatataaagagaggcaccacagtcatgtggaatcctatcttactataaagttataccccactaactccttaagtttaacatacaaagatgccacatcatcatccactaacaagatgccacatcatcatcgactaacaatcatcacatttaaacatcatgcaaacatgctatatctttatagtttttatggtttaagagctcttcaaatacaaacatgttaaattatcatccaatataattcacataatgtttcaatgtatatctttattatgttttatgatatcctatatacttatatagttcatcctcacttagttagtgtttaaatgattaatctatggtccaaattatctttctcctttttcctctaattaagtcatatcacatcaattgtttttagcctttagatgattaatctacattccaaactatctccctacttttcttcttccataaagtcataccaccttacattttacgtttgaatcaacattctatatactatttaaatttaaattatcataaaccacattaatttacttaatctgatgttatctagctatcttacacgttattttttattgttatcatactaaattcccgcagcaatgcgc

SEQ ID NO: 51802 - DNA, 920 bp, Oryza sativa
acttgtgcatgaagatgtccttgccatcgagtggctgccgacaaagatcatagtacgcctgaaactccaccacctagaacacagtcgtgcccgcactgaaacaacacaggttagtggcgcatcgccgctccccctgagctctaagacctccaatggcgcggcatgggaccatgtggtggtggaggacgacgatgacacaacaaatggcaacggtgaagatcgccagccttccattgatgctgccgctcctcctccggcacctcaagtatgaccagaataccaagcctgacccaaacctcacctgcatcgcggtggcgccacccaccgcgtggcgatggcgccacatgaagtgtcgcatggtccatggggctaatcggcgacgggatgccatctatgccatccagataccagtaacgcctaatggaaacgttgagcttacatgccacgacgctggccttcaccacggacacaagatactgggaagtctggaaagttttaaagatgtatttttttccctctcacttacacgtgagtcgtataatttctattttgtttttgctaactaggatgtcacgtcaatcaactgtcaatgatgtcttaaggtccatcttaaataattttgataagaaataaagatttatgttattatgcaattataaactcgactctaaggtgagagacaacaagcgggtagagtccgattccaacagacgaacaaatatctacgattctccactctctattgacgcgaatatttttctcccaccgggaaattaaacgtggctacctcgtcgcgtttagctcaccgtgagccgtcgagagctcaccaatccggcagatcgccaaaccagttcgagggggaagccaaggcggagccacttccatttggggcgcgagaacagcgacacgctggcagagtg

SEQ ID NO: 51803 - DNA, 834 bp, Oryza sativa
ccaccaccacccacacatcaactttctttccacaccacccaaaccaaaatgaggagtagtttggacgcttacctcgagacgtcgtcgcgagagtagtagcggaagaaggagcatcgcggaaggaggtgggtgttatactttgcactaggatcacctaggttagatctagtcgggtggttctatttgggattgaggtttgaactatagagattgaaaacgggagagggtttagatagaccgaccggttgaggtgttggaggatgaagaagtgccggccatcgtctccgttggcgctcggttgtcgtggatgcggcgccggtgaggtcgacgacgatgacggctgcgggagtgacggttgtagatgtcccggcgatgaggtgtggcgcggcggtggcgcttcccgtcactggctgcgccccctcttgatcggattagggtttgtagggtggagttggcggcggcggtgaatctcgaaccttgtgccgtgccggcctccacccctcttttattatggcgcagtgtgacgggggcccaccagccattgggctgggcgcccccgatcagggcgcggtcaaggcccccttgagccgttgggctcaaggggagagagatctatctaacattctcccccttgatctcactttttcttttagctttttctattccatcacagatttgtaaatagagcatgtttcatcgtcacggtcaatcaccgatggattcgacagccactatacacatctctattcagaaacagatactttacttttgggccctgtagtccaggattcataaggcttcccttaaacccatgccggctacatgttcctttga

SEQ ID NO: 51804 - DNA, 566 bp, Oryza sativa
ctatgcagggatactgtttccgctcggctatctaatccgctaggtctatacccattcaagaagtacggttgtacgggggtcgtttcatgcttaacttcatggctcggtccttaattgaccggggacggtactagccttttccagataccacccaaatcctccgtccgccccagtcgaaaacagttgtttaattttatttctcctttcacaaatcatgtcatcaacatcatggcaatgtggcgctcatgtctctacatgccgcatctcaattaccttcccaaaggtaattgcccaagcatatagcatttgataaatatgagtatgcatgattctagaatagcatttctaagcaattgtcatagttgactagggactcatacgtaaacatggttacaaagatttaagggtaaacaataatcaaggcatggcatgatcacaagtaggatgttcatcatcgcatgcaattttatttgtaaacaaaacaatttcgcaattgggatcaacatgttcaaggaatattgatgacttgccttgctcaatgtcttgcgggccttgaccttcgcttg

SEQ ID NO: 51805 - DNA, 1396 bp, Oryza sativa
gaatgcgaaagtcgatttctttatattaactttattattcgcgaactaaggcaaacccaatttcgattcaaactattttgcgggtataaatattttgttgtcataaatttttaatttaatctacccgagcattatatccatataataggttagaaatttctatcgcgagctaaatatcggacggaatcctagaaatattatacgatttagtttagtctatgactaaatgattaaatataatacacgggtaaaatccctagtagttaaacccaaatttctaccgtgaatcgattacttatagggattacccataaataatctataataatccataagaattcatctatttgtttagttattaactacatctaaattattaccgcgaattgatttcttatagaaattgccaagaataatccataatttatattaaaattttcaattctacgactataattaatctataattaaattccaattattttaaattttctaaacttccctaatctccctctaatttcctatttatttcctttttctttttctccctttctttttcttttcttttttctcccggctccttcctcctttcctctctttctttttctctctcttctctcctcccggctcctttctttcttttccttctcttcctctattctctttcggctccttctccctccctctctcgtcctgcctaccgagaccggctgaggaaaaggaaaaaaggcggcggcggcacggcttactggcggcaacggcaatggcggcagcgcacggtggctgcgacagcggcggtgcacggcggcggggaacgtggcacggccaaggcgcggcgtggcgcggcggcttcttggcggcggcgcggcggctctatgcgacgactccggcggcgtggaggcggcggcgtggtggagtgggtagaggagaggaggtgaggatggagggaaagagtgggaatagtggggtttatataggagaggggaagagataagggggagaggggagaggggagacgcgacggcggcgtggggcgcgaggtgggggcgcgcggcgcgaggcgacgcgacggcggcgtggcgcgagcgacgcgatgggcgagcggcagcggcggcgcgcggcgcagcgcggggcgcatggcgacgcgacagcgacggcgacgcgcgagtgatgcgacggcgcgcggcgatgtgacggcgatgacgacggcgcgcggcgcggcaggcggcagcggcgcggcgcggggcgcgaggcgcggcaggcggtaacggcgcggcacggggcgcgagacgacgggacggcgcggcaggcgtatggcgcggcggggcgcggggcgcgagatggcgacggtgacggcaaaggggaggcggagcggcgcgcggcgcgcggggacggg

SEQ ID NO: 51806 - DNA, 3576 bp, Oryza sativa
aatttacttgaacttaattagagttaattctcattccattgcttttaaatttgatggatataaatatggtcgtaataatattttactcatttctatccttaccaaatcttattttaaattgcactttaattatttactttgtccatttactttttagggtttattcctaaccaattatccattattcgcgatttataaactccgaacccaaactccaataaaataatcgaataaaatccgcatgatgcaatttattaaaaaaagtttttgaaaatccgcatttttagagttttgatttttgtcggtcgaattttcagggtgttacacaagatgggccacctgagccttcgggctggcacggccctgcacgaagtgccccgatcgctggtgggccgtgcctagcagtgcctgggctgggccgtaccgggcgggtcttatggccatctatagtctccattgttttagcacgtgctaatacttaatatggcatattcatggccactgatatgtatatatgtcatagtatatactcggtgctgctataattatatcaacacattttcttggtaatcacagtcgattttcagttcaattgatctcgcttgagattcgtgctatgattgaaataccagtgcactgaatgtcgtctttgcgtgttgcgtgtgcagcgtgaagccaaaaaatattaaatttaaatttacaatgtaaatactccctccgtcccaaaaaaaggcaaaccgtgggttttcgtgccaatatttgactgtccgtcttatatgaaaattttttataattagtatttttattgttgttagatgataaaacatgattaatgttttatgcgtgacttatctttttaatttttttcataattttttcaaataagacggacggtcaaatgttggacacgaaaatcagggtttgtcttttttggacagagcgagtacatactaactatttattgtgaaaaatatgacatcataaatatagctactctcgttcttttaacataaagttagagggacgtaggtcagtgatatacgaggcccattcacatgttagagcgacacgtcccttctatatatacgtgagatgcgtatcatcgtgtgtgtaactattctttcttacattacatgtaatcgaaaatattacatgtattttaaaactgtattaatattacaaggacatgttttctaaacctaaaggatatatgagcgcggaatatatatttattaaataatataagtatactcagaccgacagaacataaccctatccgtatcattctccagccaagctttaaacccttctccatttccagtttcctcatggtctactcgtcgtgcggtacaccattctattttctatccccttgcgcctagcgaccagccattagttcaaagacattttgcttgtatctgctcttcctctcccgcgaaaatcaagcaccgaggtgagcgccctccactacatcgctgcggagaagagaagggcgtcgtgagtggcaggtttcgcctccaggtactgtacgtattattttctacttctattcttctatcatggtgtacgtttgcgcctccagttttcttccaaatagtgggagatcggtatgctttcgtgcatgtcctggccttccttggacagagacacagagtattgccgtaagccgcggatgtatcatctcttcgatttgatcgatttgccgccccggcctttgttttgtcgctgcttgttctgaggagatgatgtgtcttccatgaagatgaatggggcaacaacaggacgtgcctgccatattcgtaggatcatcagatcatcctaatgtaaactagcactctgtttttctcttttcatcatctatctctctcctgacagaaaatatcatgtgctaagagttctttgccatgacagtgtaaattttacacaagtatacaaagccgaacatgcagagaatttcgcttgttgaaaatgcaaaaggttgattacacgtatgcttttcttttcgaagtatcaacaatttcagattctgatgtaggaaggcgaagactatttgtgtatatagaaaaatgaagaatgcttgttacataaccaagcttcaacaccatgcccagtctacaaaaatagaaaggaatatcaaggcgatgcgatattaactatacttaatcaaattaactgctccagctcattgatagtgaaatttgaagaccatgttcaatgctcattcctctctgaccttactcataccatctattccttttcaaaaatataaatctcgaccaagtctttggcatcgatctacgtgcattgtcagtgcaaaaaatatatattaagaaggtaatggaagtgaaatactgaaatatcaatataattccatctaaaaacaggaggagataatggccagtgagcacaatactccctatggtcataaatatttgaaatttagaataagattacatcaaatgtcaaatgcttatgaccagggggagtaatatttagtttgaagtatgaaaatgagacataaatttatgctgctaataaactactatagaatattggtttgttagaactgtgatattttgatgaaaaatgtgcattggaatttgcattttagaggtgtctcaattgaccggtgtgatactccctccatttttcaaatatttgtccgtgttaattattattgtttgaacttttattatggtcaatttttgaatggatagattatgatgaatatggttaaatttaggatgcaatccactttgataatgtaagtatatatttaagttatatactccatccatttcatattaaaagatgatttgactatttccccaattaaacttctttaagtttgatcaaatatatagaaaaaaatagcaacatatacaactccaaattagcttcatttaatctagcattgaatatattttgatggtatgtttttttttgttaaaaatattgccatgtttttctataaattggatcaaatttaataagtttgattaagaagacaaaatcaaagcataaatatgaaacgatatttagaaaataagaatgaacaaattttaaatacgaaagtatctagtgatgtttatttggactttgcaaacagatgaagcagtaccggtttgtggcatgcattatgattgtttcctcctgggcgtccttatcttagaaagaaattaaaccattaattttggtctcatcctgttacattacacgctctggcttattcttggttgcagacaagctatagctctgcgcccatcggtcattgcccgtggagcctatactatatcgcgacattccgcactctcggccgtgcacaaggtgtcgatggcgtcggcgcggccgtaccggttccccgttccggcggagggcggcgagccgaccggacgccgctccgccgccagtcgtgcgggacgtgcggcgcgtcggcggtggcgagctgcgtggcgctgtgctgctgcccgtgcgccgtggtgggctgcctcacgctggccctcgtcaccccgccctacgcggcgggccggcggtgcgtggccaggctcgccgccggcaagcggcggcggatgatca

SEQ ID NO: 51807 - DNA, 525 bp, Oryza sativa
ctgaccaatttagtccacatcgttctcttcctcctttgattttgatcttggatagccactactgggtgcatctttctcctgctcgcgctctctgtgccctgttcatcaccgtgttctcgttttgtgttagtggtgtgtggagtctttgattgctgtgtgtttttaagtttctgcaggatgtctatgttcttgtgggtaagtggggtatgttcaacttggctctttagccatctttgtacatcttcacctgcctggatttctagtatcaactgatgttcttgtaatttctatattgatcattttcagaacgacccttgattgctggcaagtgggtatgggcactgttctcttttctttgatctgtcatccgttctgtaaattgtgtttggagtttgttatctgttgtggtacatatttttttctactcttttggacacggtttttgtttaagatccctactatggctgttgtggtacagattttttctactcttttggacatgttttttctactatggctttttga

SEQ ID NO: 51808 - DNA, 748 bp, Oryza sativa
atgtaggctattgatcaataatagctagttaaaatagtactgatatgtactatagcaatagaactgttgttcaattaactggaaaatagctaaagaaaatgagaatttctaacactttaaaaaggtttggaactgcaaacagctacactgttcaatgcaaggggaaaattatggactagaagaacaaataatgctgtttaaggaaacttgaaaaataataagaaaattgaatgggcataatacagctggcatattctacaaagccatagagagcccatcgaaacaaaaggaaagaagtcttctgtgttatgcatcactaaaatatttattcatcatattttgataggtatgtgttctagtggcactgatgaccttaagttagctaaaaaaattgatagggggcatttgggaaatgtatatcagaaaatgaaaagaaacaaaaggaagtatttgcaaactaaaattaactcactaaaacatctattttggccatgattgtctgaggtaatagttacattgttcacaattacagtcacctgttgatcagaaaatgggagagagagagagagaagtatttgcaaactaaaattaactcactgaaacatctattttagcctgcttgtctgtacggttgttcacaattacagtcacttgttaaccatatctttttaactttaatctttgctgtttagaatatgtaaaatggtcatatgaagccattttattatgcaatttacatcatacactg

SEQ ID NO: 51809 - DNA, 1051 bp, Oryza sativa
ggagtttgtagttgaagtggggagagtctggaggcggcggtgtcaccagtgaagctccggatgggttgggtgggtggggaaagtggaggggttgtgagggtgtaacatcctgaaaattcccaataataaaaatcactaaaattttgaactttttaaaactttttgcatcatgctggatgttatggttgcttttacttgccaagctataaattgtcacaatggaaaattaaactaaagttatacagctaagtaataattataataataagatatttattatgaaccccataaatatttactcacgagaaaacaaagcgagacaaagggaaggttaattaccaatttaatttatgtatcaaatattaaatacttgaaccatgtgatgcgtgccatgaaatataaacacttatgataatcattcaaataaatggaactctaactatagagtagttttactgggaaaaattaattagatattatataatttgaattgaatcacaaatgctaaattatagaaatctatgtggtggtaaaaccaatccaaaaagataaaccaatgtatgtgaaaacatataaataccaaaatcccaaatatagggaaatataaaaaaaatctaggatatatattaaatattggacaatattaaaattttgggaaaattcacatttgagcacttaatacggtcacccaaatgcttaggaataaaccctaaaaagtaaattgactaagtaaataactaaagtgcaacttaaaataatatttggtgaggatagaaatgagtaaaatattattacgattatatttgcattaattaaatttaaaagtgtcggaacaggaattaaccctaataaaagaattcaaataaattataaaaaaataaaatatgaataaattttaatttaaattgagtttattagttgagataacacaattattgaataaaatgcataggtgcaaaaattaggatttttggaatcaaaatttatatgggaaaataccctaaaatcggttttattagaaaatggcactattcattgcccgccaaagtgt

SEQ ID NO: 51810 - DNA, 741 bp, Oryza sativa
atgtggacccccgtttttataacaggaatcattcgtgtaatcagtaccatttccctggatcaagtagtttggtacacacgaactcatagctgaaatatcaagtgcacatacacgaaagtctagtacgaattattacatcataagcccgcaggcacagtcttaaatcatcggaccgagcggtccgaaatacttccaaaagcagaaatagataaggcagcggaattcaggcagcggcatgccattgccacaggcaacgaccgtactaagacctactgagcgccatcgtcttcatctccctcctggtagtaggcatagggatcctccgaagcttcatctcccgcctctgattaattttatagttgcaagggtgagtaccaaccgtactcagcaggccaccacagcaatgatgcacatgacagaggaattcaaaggatgactatagttcttttgcgtaaagccagttttataattcttttcacaagcctaagacctagcatagactgatcaagttttaatatcagtgttcatattaaacaatgacggttctgtccaccatccattgtgatcccaaggatagcttcccgccattaagtcgtcatggttttctgaggacgtccacattcccgcctctcaggaagtggctccatcagcataaaaatcatcatgcaatatcccatcccacacaagttaaagaatttagagtctagccaagtgtaacacatgtcccggtgctcaataacc

SEQ ID NO: 51811 - DNA, 670 bp, Oryza sativa
cttccccctaaatttctcttttctttttcttttctttttcttttcctttctttcccttttctttcctttccctttttctcctttccctttttcctttctttcccttttcttttctttcttttctctcctctctcccggcctcttcctcccttcctctcttttctctccctcggtccctctctcggcggcgacgacgatggagcaagggaggaggcggcggcttaccgacggtggtggcggcgacggcggcacgacgacggcgcacgacgcggcggcacgaaggcggcggtgtggcggcgcgagggcggcgcgacgagacgacggcgcaaggcggcgacgcaaggcgcggcggctccggggtgacggcgcggcggcttcggaggtggaggcgcggcggcacgacaacggcggcgctaggaagggggatggagtggggaaaaatgggggatgaggtgggattttataggggagaggagggaggagggaagaggggagaagggggagaagaagagggaagagggcagcgacgcggcgatgcgacggcgatggcgacggcgcgcggcgcggcagcggcgcggcgcggggcgcgaggcgcggcaggcggcagtggcgcggcgcggggcgcgagatggcgatgggacgcacgcgcggcgcgaggcggaacggcgac

SEQ ID NO: 51812 - DNA, 614 bp, Oryza sativa
gtatttcttcccaaatctgtgatgcttgtggatgatttgggatatttagggagcaaatcgattgagcaatgaaacaacaacaaaaaaaaaaaaagaatcaaccaggactgctccaccatttttagtcccggttggtaataccaaccgggaataaagatggatttttagtcccggttatttcacccgggactaaagatgggtatttttagtcccggattcgtactcccggttgtataaccgggactataggggggtttctaaccgggagtaaagcccctttctctaccagtgcgaggtcctcatggagatttttatcaggctgccggcgaaaactcttgctcgtttcaagtctgtctgcaaggcatggcacaccatcatctctgaaccattcttcatccgcagtcatctccgccactctgccttcaagcataaacaggagccctccttttttgtcattttgcatgcgctggacaatgtggttgaaattactttctcgaataatgtccccgtcttccggtggaaggatggccagggcaatgcatgccttgtgcatgcaatggatttccatggtgagtatcagataatcaataaaatgtctcactgtgatggcctgg

SEQ ID NO: 51813 - DNA, 1181 bp, Oryza sativa
gaatgcaaacgacaactgagaaaatggcgctacagctaagggctgtagcacctcccccgattggaccgatggcggtgaagagggcatcgtcatcaccggttcctccaccgtaaccgcgaacaggggctatggcagagaaggtggcgccgtcgcgagtgactacagcacctctgctgtcgacagcgtgggcggcggagagggcgtcgtcgtcgtagtttccaacgtcgccccctaggcctcaaaacctgcacggagtgccaacaccaattctgtcaccttggcaagcctagctgtgatctctgtgatggaggtctgcatggccctagaggattgacgcagcatgtagaggtcatggatggcaggcatggtgaatggcgtggtggggcggatgacaggatcatggtcgtctgataccatatgttatgcgcgtagatggattgggtgctcgacaggagggcgaggctactgtagcctcgaagcaccggagcctaggtgaggccgaacagagaagagggagactagagatatgtttaacttctttcttgattacctaggtgaaaccccgcgcattgctgcgggaatttagtatgataacaataaaaaataacgtgtaagatagctagataacatcagattaagtaaattaatgtggtttatgataatttaaatttaaatagtatatagaatgttgattcaaacgtaaaatgtaaggtggtatgactttatggaagaagaaaagtagggagatagtttggaatgtagattaatcatctaaaggctaaaaacaattgatgtgatatgacttaattagaggaaaaaggagaaagataatttggaccatagattagttacatattttatccgcaagcgcgcacggatataccattgtaacatttcacccgagagtattccaagtgtatcgtatttgtttaatcccatggaaagattatagtagagagaactgtactaataatttatatattacctgtaataaccatagtctaaataggggataatataagcaaagggtagagtgacacacaagcataaggctactcattctcatattaaattatctaagctaggtgaaaagaaaatagaaaagaatatatccctacacttctagtatacatataatatatacatcctagctataagattaactagctaataccatcttt

SEQ ID NO: 51814 - DNA, 577 bp, Oryza sativa
ggtccaccgccggtccacgggaccgacggtccggatcggcctcaaagacgatcggacggcgcggggaaggcggctaggcacggctcggcttcaaagccgaccggcagccatggcggccgatggcgacacgcgcggtcaccggcggtgaccggcggcggcgcgcgagagccggcaacggcaagcgacggcgcaggaggcggcggcggccgacgcacaggccggggggggcgcaagaaggcgatggcgagcgcagggagcggcagcgcgtgcgggacagagggaaggagggaggagaggagctcctcacagtgagcacggcggccggcgcgaagaatgaacacggcggcgatgaccggcgatgcggaggcacggacgggcggcggcgacaccctaggagaagatggagaggcgttaggagaggagccgacgaccacggggcctttaattgctgcccggagatgaggggagggaaaaactcaccggctcgcgaggggagaggccctccggggggattccggcgacgcgaggcggcggccgggaaagctcttgcggcggcgaagctaacggcggcggcggt

SEQ ID NO: 51815 - DNA, 537 bp, Oryza sativa
atgagggtttcttcgtcttcttatataattagcgctttcttccgctgcgtggcgcgtcgagtggtaacgatctatgatctaatacttgcatagttcatggtttatacgctagaaaattttgatttatgctatcgtagcgtgcgcgtatcccaacatcttcctctgctcgacatcatttgctactgttgcatcctcgctaccgtgcaagagttgcccttgccgagtgggagagagaggaggaaggaggaagaagatgactagagagaggagatggtatccatattagcatcacgtaaaatcccagatgggttgtggcaatgttgggccagaatgacactttaatagattgacttagatgcgcattttaaaagtacgggaaactataaacaaatctagggaccagccatacactttagattagtagatatatagttgaaaacgatgtgcattggagcaatggtggacgcaaggctcattaaggcctggtttagttcccaaatttttttctcaaagacatcatatcgaatctttggacac

SEQ ID NO: 51816 - DNA, 761 bp, Oryza sativa
aacatgtgtagtagcttacttagggctgctaaacgctactccgtaattgggtagttataaaagtagttttcgagtatgctatgaaacatgtagtgtgatatgaataatcaatatgggatttcccccttctatggagagatatctctgggcccctcgatgttatagattatgaaagtgcatggccatgccaaaggtgattgaggagtctatcacaacttatataatctatcacatgttcgagtgaatgattgagatattagaggatggcacatatctagccttgagcttaatcgatatcgcgaggcaaaggggtttatacaagtatacactagaggctcagccgatatgatctttgtctatgcccgatgggtcaatacgttctgctagagaccactattgacacgtggaccgaaaaggagttttcgggttacaaccgagtgtatatgaacctactgggtcgcacgcttaatgggccagaataaggggatggatggagatccaatatgagtttaattcggatagggatctgaataggagtcctacgggccttggaggcccgagtcatggatcatatatattcatgagggatgtgaccggtagatgtattgcatcacgtgagaaaccctagccgccactcccctccccgagcaaaaccctagccgcgcgcgggtgctagcacatctgcgcatgtcgttccgtctctgtacgtgtggataccggtagagacgccactgctttgtggtgctgatcggcgtgagagt

SEQ ID NO: 51817 - DNA, 694 bp, Oryza sativa
tccaccagtgtatcgcccagtcctaagctaagtacgtctccgttttatctgccgtgcgtagtgtatttttttcttttagcgtcggtgttccaccgtgttagcttgaagccacgcgaggcgtgagtgacacgagacccagagcagctgaccggctgcctcgtctaccacattaatctggacactggattataagtaagatattgagtcgatactgaattactggtggtcaactgtttaattgcacacatacatgatcaattgaatataactatcatctatctattatattattaaaagaataaaaaaatgagcctccacgttcgctctcatggcctagaaattctcacgttaatcggagaaaaagaaaaagcagagtctatatagaaatacaatttagaaatagctgaaattcggaattaaaaaataaggaatattagaagaggagactagagtccatatagaaatacaatttagaaatagtttaaattcggaattaaaaaataaggaatattagaagaggagactagagtccatatagaaatacaattaggaaataactgaaattcagaattaaaaataaggaatattagaagtagagtatagagtccatgcagaaatacaattaggaaataactgaaattcggaattaaaaataaggaatattagaagtagagtatagagtccatatagaaat

SEQ ID NO: 51818 - DNA, 726 bp, Oryza sativa
aaccggtgcaatttgactcttaagacggttttgaagggcggttttgctgacgtggcggtattgaccgggtcttctttatacgtggcgttgacgtggcgcttaagtggcattagaattaaaataaactagttgataccccgcgcgttgcggcgggatatttgtattgaaatagaatttaaaaatccaagtacactttgtgagataaaaaaaaataagcaaagaagggaaactgacgcaataccaactgcagtctgaaattctggatgatagtggagcaacttttgcaaggaataatctgatagcaatgcttcactttgagtgcattgagaccccctcatgtaaaacaccacaatagtgcctgacagaaaataggagtatattgatcaaacgctagcttccaaatctatgggggcaagaagaacaatactgaaaatactcaatgcagtccttgtcttacatatatatatatagacacacacacacacactacagatggaagtttgaagatcatcatcatatctaaaaaaacaggattcacctaagatacaaagacatgatgctacctcagaagaggaaatatgattcatgaaagatacaaaagacatgatgctacctcagaagaggaaatataattcatgaaaagttgataaattatgcagtttctcagtacatgaggaagataaacatgttatatgaatcaatgtaagtttgaggtaaaataaactg

SEQ ID NO: 51819 - DNA, 626 bp, Oryza sativa
aaaaaaggtctatgtttggatgtaaaaaaaggttaggaagcggtaacacgcaaggataatactcaccttagttggatttttcgctacctgtctcttggcggccagtccacatatatcacaccatatactttagttttcaatgccacattttatatatttaaatatacttaaaaaatgcccgtgcgttgcatcgggtgaagtcttgttaagatggaattcattgtgggggttcgcttggatatatatatatatatatatatatatatatatatatatatatatatatatatatatatatatatatacatatacacatacatatacatatacatacatatatacatatatatatatacatatacacatacatatacatatacacatacacatatagatatatatatatatatatacatatatacatatacatatacatatacacatatacatatacatatatacatatacacatatacatatacatatatacatatacatatatacgtatatgtatatgtgtatatctatgtatatgtgtatatgtatatgtgtatatctatgtatatgtgtatatgtatatgtgtatatgtatatgtgtgtatatatatatatatatatatatatat

SEQ ID NO: 51820 - DNA, 1987 bp, Oryza sativa
tttattacctcgacaaactagacgaaagacgttgcgacgaagaagaaacctacccccaagatgccatcaagagtaaggatatcaaagagagtgagggcaggtgctccaaccgaaatgcctcctggaatctcaacaagcaaatcttgcaaatgaagcactggcaaagactcaaaaggagttagcagagttcaagcagcagcaggaagagaacaatttccctttcgacatatcttgagcctttcccagggtaacttaaatatgtcctagtctcctttatgatcttatgcactgtgatgaactccatgtacttatatctgttttgatggttctgggcacttattgtcatgtggtggacttggttatgtgaaatgatgtttagtgctatggtggacttaattaccatcttgtagtaaactttgtggacttaatgtgaacatatgtgtgctagatgaacttatttgtaatatggtgctatgtgaagttggtatctgtgatatatgtgatgttggacctatttgtaatgtgctgtgaagttctgattgtttctccatgtgatcaatcttgatgttgggcctatttctatgtgctacgaagttctgattgttttttgaaatgggtcaatgctaaaaattttgtagacctcatagtgggctgggccacaactatatgtaaagtgtgtgaccaaatgggctggccaagaaaaatgagtgggccttcatccctactgtgtttgaaacgtgtcatccaaacaaatcaacacgtggcaacatcatgtaaagacatgtgtcacaaatcagatccgtacacgtggcacttcaaaacgagagcacgcggtgccccaccttcggccacgtggcgtcagcgtgcaccaccacgtggacatacgaaatgttaacacgtggcactaaatatgaccgccacgtggcgttaaatatgactgccacgtggcattacatatgactgccacttggctctagcgtactggagatgataatccagcgtggcgtacatgtcatccgccacgtcacagccaacgtggactccacgtgtcaaagccacgtggcttggactacgtctgtcagtggccagctggaaagcatttctgtgacgagcaccttcgtcatggatagaagcatttctatgacgaaatctactgtttcgtcgtagagaaacatatgtgacgcgacttctatgacgaatcatatttcgtcataagttcgtcatagaagttactttatgacgatttgcgcgtcttccatgacaaaagtagattgtcatagatgtgcctatctccactagtggatgcagcctcgaacaacaccaacgtagccgacagattcactagggccggcggaacgtaggacttaccccttcgccggagatcgaaagtcgatgcagccccgcgtaaggttccaaattccgccggttgataagtaaaaacctcaggaaagagggtggcgatgcgccgagagtagttgtattgatcgagattgatagattacatagaccctgggtgtacatatttatacccatgggttgataagtccttgtcggacaagaaagaaactatcctaaagataaaaggaaaacataaagtccttatcggacactaaacacactttcctaaagataaaagaaaactaacaaactattactaattaatagataaactgccatgccgcatccttcttgaactcggactcttctggataaattccctttaattgatccaattccatcgagaacatggttgctggcgatttgacaactcccatcggctgattccaggactctaaagccgatattgactctaagacgatgatgactttgggcttaccaaatttcactgttaacatgaccataactggtcgcgtctgggaaaataggacccattttcgcgtgcggaccatttaagagaacctcacggaaaaatggaccgcacgcgaaaatgagcctattttcacgtgtggacatattaaaagagccg

SEQ ID NO: 51821 - DNA, 548 bp, Oryza sativa
tgggaggttagctgaggttgcagtgtgtttcttatcgattattatttgatctagacgagctgacaagatagactttccacttcaaatcgctctcattacgtttctagaatttttttttgtgtggcaacaaacaaaataacataatattattccggacgttatgaaaggacatgtatggaccaaagtatgctttcttaacgatgacgtcagcatacacctcggacactgaggtcttagtttcacatcacaaaatgaaagtttctctataaattgttctggtccaaactaagaaagcaattaatagctactcaatccaatctaatctcgaaacaatttcgataatatcgatgccatcattttgcttctagatcaaacaaaaaacattttttttacccatttcttttgtggcatggcatacacgttcagcacaacattaaaaaaaaactcactctctgtctattttaaaaaacaatttcaggccatgaagaaaacaaattctcttttccaatcagttgaccttgccaggataaaaaggcaggtgcagtggc

SEQ ID NO: 51822 - DNA, 837 bp, Oryza sativa
gcacgtcggcggtgcgcctctgaagaagtgcttagcatggagtgcctatcgtcgccgtcgccgtcgccgtcgccggcgtactacgccgcggtcgccgtcgccgcctccaactcgtcgccgaccgtgtcgtcgtcgtcgtcgctggtgtcggtggaggaggccggcgagaagatggccaacgggtacctctccgatggcctcatggcgagagctaggaggaagaagggtgagttcttgagagacatatggtttgtgcatgcttcactaatttgttgtggtttagcactaattacagccacctgacagtgatctaatcatcattaagactgaatttatttttgttgatgagaagttatttgacttcttttgttatgtccccttctccaatttttccaccagttgctgtctgccatacaagcccatttttatgcttccaacttgtacaggaatatatgcatgactgacataaatttcctaagaatcagatttctgtctctcaagttgcaacctgaaactctcatccttatcacaaacaaagacctgatttatcctagttgtctcgtcctaatcatttgcatctagattcttgaactccaaacactagattgtttttgcagatatcaacagataaaaaaaaatcctctaaattgctgtgttttctacacctgaaattctgaacatgtcaaactcatcagttaactgtcatcaggtgttccatggactgaagaggagcacaggaaattcctggtagggctcgagaagctcgggaaaggcgcctggcgcggcatttcccggcacttgtcacgacaagaacaccgacgcaggtggccagccatg

SEQ ID NO: 51823 - DNA, 853 bp, Oryza sativa
acatatttatcagttgcaaaggtagttatactatgcggactaagtggtgacatacacttgtttcatttatctactgtaccattagttttgtaaccaaatttgtctctctaacacgttgtagagacgacaaattaatacagataagactggtctagctcattcaaggttgattctctccttatgctccagttagatgatcatgagatcaattcgtctgtcagctcataggcaattcatgtatgattcttccaaaataattacataactcctttgttaataatggacactttttcttgatgtgatttttttccatacgcatgagtacgcttggtccttttattatcgctataaaataatttaaaactctaacatattactgttacattatcagtaaggagtaggatcctacaggggttcagtatttctgaattaaaaaatattttgcatcatcgatatgccattccgtcgaaaaaaaaaaccaaacttgccatgctccccatctggttgttcaagtgatatcctatctgcagatcactctggacatttttttagttgattgacttttgtggttcagttttgctttgacttcttttcatttatagaccgtatggtttaccatgtaattatcataagtgcggtatataatcctttccaaaaggtccatggttgaatggaaaataaagcccctaatataaatgtcaacccaaccatacgttgatcggtcaccctcgtcgaatagacagcacttctataaggaaccacccatgttaggataagaaaaattattcggttcagatcatcatttggatgtaacttaatttggaagcgcatcatgtatgtacaacgtcaaatc

SEQ ID NO: 51824 - DNA, 875 bp, Oryza sativa
aatgtatgatgccctcctgcatttttaccatgtagcagtatatctataaagactatagtgcatgcagatgttattcggtttacagtcatgggcactatatttctagcactaggatattgatgaacttcttttacaacagagcaaatctttcgatcattggtacagcatcattttggtatttaaacatgttactgaagttagtgcatttggcttcattagctgctgccaaatatctcggtctacaaacacattctctataattgttcagttaaaagtaaatttatttgataggacagggatgaccaaacaagtcatgttgtttccctccccaaacaaataaatttttaaccttttgttaccaattgaacatttcttttcttaccttttttttttgcatgatgaacacttttgaacattggttttttgttaattttccagaaatatcaccactggagctccagaagtcatggttaattttgtcacatcatgttataagcagagctattggagcctcttgttaacaatatcacaaaaataccagaagtggtatgtaattggtgccttctcattttaagtgtactatgtcgaacagtgtaatgtttaaaatacttttcatgtactgactattatgtcactcagagttctactgtacagaaatcgtgggttgtaagccaaataaataattaattacttcttcctacaatattgatatgcctgtagtgttgatgtaggtcagtatcatgaataatgtgaatacgtctgttggcaatacatctgtgggggaagaagaatataccttgtatgagcaacctcccattacagagatgttgagaggactacattccagatatctgccaactccttttccagactca

SEQ ID NO: 51825 - DNA, 825 bp, Oryza sativa
aaactatcgtaaaacttctagatttctcactatcgatcatgggagagtgatgttactaaatttatcactaaataaactattgtaatatgctacaccgtttattaaaaataattctctccctcccttcccatacgcatgcacgccagcgacgacaaccgaacgggagaggtgggcagaggcggagagggtggacgagggtgtggtggcggcttgtcaaccaccatggcgtcgcagccacgctcgtcaccttcgtcgacatcaaacgcccatgtcgcacactctgctgcggtgtcctcgttgtctcatcctgcgtcgccaccgccatgctgctagcggtttccctcgatgaccacctcactgatgccgccatggagacggtctacactccctcctgcaccttcgtgtgctgctccggagctattgtttgtgcacaccttcggcgccgacctttccctttgcttcttccccgtgacggttggttggtctgcaatggcgttgtcgtagcgattcttggacggccacaatagccacgtcctacttgcagtagctcaccatcgccgacacgttggctcgtatcctgaggcgatgtcgctgctcggatttgacatcgtggagaaaggggaggacgacggcagtggccgctctacctgctcaccatgtgctgcttatgtgtcaaggtgtgggctggagcggaccgtcctcgcggctgtgcaaatccggcagctcagcgaaggatccatgctgcggcggagaaggaagagaccgggagattggccgctgctcctttcccgtgggccaccgcacgtcgctcctcttccacaggtc

SEQ ID NO: 51826 - DNA, 549 bp, Oryza sativa
attggtcgtgtcatttctgcgttcttgatccattcattgataagtctgattctcgacatcgtctaattgaatgatcgtttgtttttatgtcgattcttctccagtttgtgttcattctctgcaagaggttagtaatcctagtgctagtgaaatatttattattttgacataattatgcattgcaagcataactagttctcctttatttaggtagtattgacgggcgaaactgatcgctaacgaccatcagcacccgtcacactgagcaatcacagaaccacaatctagaataactagctttatacctgccaaagttggatgcgaccaagtggtgaaggtgagaacgatccgaagccttctagactccgacctgtcaaaccgtgcaatcacagaaccacaatccgggactaatccacacaagaggcccgatagccaaaagcacaaactaggggcaccagaggagccttctcataagtccaaaaggactcacaagaacaaaggggtaagacacttatgcagtcttcagcaatctctcatacataaggtttt

SEQ ID NO: 51827 - DNA, 718 bp, Oryza sativa
aaaaaatatttttaatttaaataaatgctgaaatgatatttgtattatcaaattagccatttaagctatgtaaattccaagaaaatttccaatcaaataaatagttcaaatcaaaaaatatttcaattcatttttttcatataaatagttcaaatcaaagtccccatatcattatccggtgcaacgcattgacattttgctagtaattaaaaaataggtaaagcttccggttattttttcgtccgtcattaaagcatgggcccacacgatatttcgccactaatctgtgaatccggatgcgtgatggtgattttgatgctccacaaataaaagagaaacgaaaaaaaaggagaaagctagcaagcagcctagccaaacagcagcaggccggcccaacaaaaaaacaaacgcagcccatcagccagcccacaaagcaaagcagcagcccagcacagtactgcacgatactgtagtagtcaggaataagtttaccttagttccctgaatttgttgctgaatctgaaagggaaaagtataccggaggtccctgaacttgtcaccgagataaaaaacgtccttgaaccgcaataccagacacccggggtcccccaactatacaaaaccgaaaaccggtaacccaacgtccctcgggggttttgaccccagttttgatctacgtgccaactgagtcagcgtggggcccacgtggccccacatg

SEQ ID NO: 51828 - DNA, 510 bp, Oryza sativa
aattgcataaacacaaagtagggattttgttttgctcctgttaattgctgtatctatttcagtgacttataaaaataattaaagcaagctgtgcaattcaattaagtcatgacaaagtatgacaccaatgtttatctccacatcaaattgctatatcttcagcaagaactttcacagaacttatcaaagaatggatatttcacaaacatttaatgtacaaaagataagggcctctaccatcttaaaaagatacatttttcacatcatggtgtaactttcattataatgtaagtgattctcaaatagttatgtttagggtaacacagtgaaactgccatatgaagataataaaatactaaaccaccaaagccctcaagcccaccaaaaatgcagaagtaatttccatgcagatcaacaatgcagatttgatcactatttgaggggtggtagatataagaatgcaagccctgtggagccctgttcccccaaaacaaaaacacttcatgtggc

SEQ ID NO: 51829 - DNA, 758 bp, Oryza sativa
acgtgtacacctggcatgtggggcccacgtgggtcccatgctgattcagctgccacgtgactaaaaccggggtcaaaaccaccaagggaccttgggtgaccggttttgtatagttggaggaccccgagtgtctggtattgcggttcaaggacgttttttaatctcggtgacaagttcagggacctccggtatacttttcccaatctgaaatccatccctaatcgcaatgccgggtatacctcatcctccaactcacagtaccatgtcaacgtggattatcatggccagttttaactgacgtggcaagtgagccccacacgggtcccacgtgtcgggcccaactcttctctcttccttctctatcggcaatggccgcccggcggagaggggctgttgccaacctccttccccttctcctctctccctagatgcaatcggcggctggcagaagaggaacaagacgacgccgaccttccctcctccttcctcgagcttctcgccgacgcccatggccacccacctttctttttcttcacggcacagcttgccgaagctcaccacaacaactccatatctaggactggacttgctgacggcgttcgtaagctcacgcctaatggctcgagctcctcgcccccgtcgacgtcatgcgcgagcgtgctcagtacctctgctccctcgtcatctccaacaaagtcgagaacacctcgccgtgcggtgtgtcgacaagcatcgcatcgcatcgcatcgcatgtcca

SEQ ID NO: 51830 - DNA, 1278 bp, Oryza sativa
cttgatgatccggcgtggcgcgcgtatcgttttataactcacgcggggattcttcccgcgcaattttaaaaaggattagcacaaagatccgcaaggcaatattcattctactctccaccattcaatcttgggctctcgctttgcaaagaaaatacagtaataagaaatgcagcttgtctttacatgcgtgtatctgtgtgtgtgttccagaaattaatcaggcagtatgaaaatcgaagaacatgatcaataagttatcagaaggtgccatgagagcacttctatagtatcaatttaacagtaaattgtacatgcctgaagatcatattgagttcccaaaagaagcaaaaatgcccaacaaattcagccttgttttctcattagcaaatagcaatgtaacaagtcacatacactgccgtctgcaagacagtattgtttctaacaatagacgcagagatcacatactcatctgttattcatctagtcatacagtattccttcttcctctatgcatgttgtatccttcctgtagtaatcctaatgctatattgaaaacaaaaatgtttctcgataaatcttctattagtcttacaaggcaaaaggagtatcaacgccactggcaacctgacttgtcgttgtgccatatttctttctgcactctggttacttacagtatgcatttctgtgggtacgtgcagcagttccccgtatcaagcatttgtgttaagaacactacaagtgaattaagtaagctacaatcaccttactataggtaaccaagtacctatctaggaatcgaagatgcaaaagaagcaacctgaaccttgacaaggtttgtctggagccggcccaagtgaaatgccgttagaagccacacgaagcagagctgttatcagaagggagaaaattagttcttcagtgatatatgcaatcctatgtggtgatggggtacaaatacaatgactgaaaccatgacacataccggcaacgcgtagagggtgaccatggatgccttcttctcaaggctgctgaacaacaaactgtatattccggcagctgttgcatcaccaagcctttgaacaacaacatttatcaaacctattaaaattcattttcattagttaaatagtcaaaactgaaatgggtcatacatttgtgaacacgtatttaagatgattttaaatataagactaagaaggcaactgaaaaactgactatttttctacaatagcctacttaatctggaaattcaacttcaaatttcgctgctaatcaccc

SEQ ID NO: 51831 - DNA, 1540 bp, Oryza sativa
caaaacaaggaatcaccaaaatatcaaatcaaataatcagcaggcaatctatctgtattgctatgagacgttcaaactaacaaaatccattcaagggttttgaggttgattataaaagaaagaatttacaaactataatgtgacttaagtttaagaattaaaaaggaagtaaaactggacattagtccggatcaatgatatgttttggccgtgtcataggtaacagtcatagataagtcaggattttgcaaaccatgtccagaaggatacatacattgtaagaggccattccattgaaccgtgaggattctcagtgcaattcctttcgatggccatgcagccaggtccatcaatagggatgaaaacaggagcagaactgaggcacatttggcagatgtgaaaatgcattctagaaattttaaatcaggaatttgttttcttgttcagaaaatcatgcgtacagggccctagcaatgccatagttgcagcaaataatgaaccaaaaagttgcccgagcgtagcaccggccccaataaaaccaaacaatcttgaacctgatgaattaaaagagtaataagaatatcagaagcaaaagtaatcagttgtaggtaatttgccaataagttttagagcagctgtaaatgatacccactatccatgatatcaattactcttgcccatgttgatgatattgcaatgagattaagcaagggaaccttcaaatagacataattactcaaatcaataatcagtttgggaattagaataaatgaacatgcccatgtagcatgaaaagtcgtacccaaagaaacaagctattttcactatatgtagaaccactgtggtttccccatcaggaggtttatttgagcattttcgcttgacttgatttgtacaccaagaaacagagaaaaataagttttttttgtgtgaggaatgattcttagattaggaaattcagggggacagacgaagcagctgagtgaaaattcatggtacggtaattttttcccttcacaatttcattgaaatttaataactatattgtacataattgcaaaaaccaagattaatagcaatgtatattacctgggagatagaaggggaatgcccaggggtagaggcaaaccaaagaacaaaaaagacaagaagggataaactgaagaatctgtgtatgaaaaccaaagcctgaatatagatgataaaattagctgatgtcagtgaataagaaataactgcaaggatatttgtagcctgtattgttcttcagaatatttcaaattcttaaaatgtagacctcatcatcgataaacaaacggaagaaagctgaggacaagaatctggtatttagtcaaggaaaagctagctgaaccatcttaaattaaaggggtttactgaagaaatacccaaattattgcattcctgtggtaaatatacagaagctcgcacaacacagaccagaattatttttttcttctcaacagacaaaagaacacaaattcaatgattaacatggtactctaaagtaattcatcaactg

SEQ ID NO: 51832 - DNA, 1311 bp, Oryza sativa
gggaggacggccaccactgacgccaccgccgcatcccggaggcggtgccgagtcgtcgtcgtcgtcgtcattccaaatttcaatccaaactccgtcgttactctgcttgtcctcccgtcccggcaaatctaatcaaacaagtcactcacaaacacaatcccccgattccgaggtttgacgtcttataaatatgtttttttctttctttcttttcattttgacgagagaggagctgttcgttcgtattgtcaaatcaaaaaaaaaaaaaaagcattctggtatcagtatcagtagagtgtaattgactaaactggcaacaacaaaacaacgacaatgacgatgattttgaacagtgtaaatgtataaataaatgagagaatctacttatataccattgactttagtctagttcaataatctgccactgacttagtttaattttataatataccagcgtcttttgtttaacttatataatttaccatcgccgtcagttaagtctccgttagcacggtacaatttcgtactaatgaccaaaatacctctagaataaaaaaattaacccaatatattttcatgtccgcctctgttacggccacaagtacacgtgcaatattgcaggctgtgtccgtggtccacaagcccgtggcggccgcatacatacgtatgtattgctagaattctactccctccgtttcaaatgtaagtcattctagcatttctcatatttatatagttgttaattaacaactatataaatataggaaatgctagaatgacttacattgtgaaacggaggaagtaatatattagtcaatacataatataaaataagcgtgtgattagatttatttttgtaagtgcaacatgccgtcaaacaagttgctaaaacaatcatatgtatgcttagataatcatgtattatcatagaagaatatgagccgggcaacctctgtgacatgttacagtatggtatttgtgaattttcggccaaattctgaaagttttcatcttaggggtattttcgtcattagaacacaattgtatggtactaacggagactaactagacggcgatggtaaattgtagaagttaaacaaaaggcgatggcgtactatagaactgaacaaagtcagtggcagattgtggatctagagcaagtcagtggtacacgatagattttctcgtaaagagagatcaatagtctgttatgttcgtggccggatccaagctttgcacagtttagttaatttgctcctagccagtgcagatcaacatctctgggtatgtgctatgtaaatttagtttctt

SEQ ID NO: 51833 - DNA, 518 bp, Oryza sativa
tatatagcagtatggtagctaactctgtggtttactgaagtacaggctcagctgtttctgaaaacacaacactcaagaccaacaacagctttgtaagcttaaagtgagacactgaatcatcagtaacctttgaatcgatcttatcgtgaaccatcaaggcgacattgctgcatattaagaaaacaacaacaacaaaaacattagaatgcaaaaaaatccagattgaacaatgtgtgaattaacaggaaaccaagagagcaaattcagcaagaacctgaagagagcgtcgaccaggagacaggaacacgcgagagcaccggtgggttaggctgcccggctgccataatcaatcaaagaatcaataatatatcagtttttcgtcagaaaggaattaatctgatagaatttgagaatgatgaatcaatgagtgcaagtgaaggtaagaactgactgaagcagatgaagaggacttgaggcgggaggacaaggccgcaggcgatggggaggtacatcatccg

SEQ ID NO: 51834 - DNA, 1446 bp, Oryza sativa
tggcccactcttccttcgtgaaacaaacaagttaggcccaatctcttatgtttggagcggaccttcggtctttagataaatagaggaataagtttacttgatgttcctgaactttacattgagtttgtttgagatccccagtccgcaataccaaaaatctctacccctcaactatcacaaaccatgcaaaaaagatcctaaagcagtattgacccaatttttctccgctttcgccgatgtggcatatggtgggccccacatgtcagcgtcctctgggtcagctactgcggcggtgggcgtcgcaacgtcgcggaggaggtggcgaacgcctccacaggtccccgtggcggaggcagcagcgaatgcccctacgagcccccacggcggacgagatccccaccacaatggactgcctctgccctccagcgtgatgacactctctctcgtggcccgatcttctggtgagggggataactctcgctttgatcgagtgcgacgtttgcgacgtggctaccaaccagaacaagtccaagacgccgtgcaatcgctacaccacaaacgatgtcgtaccaaccgtgacgcgcggttgatgatccctgcaatgcaaacgagagaacactgcaagaacaagataagatgcaatctaaatactgcgaatagggaattaagcacaaaggaatagttacgattgaagtggtagatctaatcgacccggcaaatcaacacaccaactattgggggctctgaatctatagtcgccgactaatcgagcgaggactagagacaaggtgaatggcacttggtaaaattcaactaaacaaaactcaaatgtttttgaggatgaacaaagctatttatagaggaaaataaagctagggttcagtgctaattcgtggaggtggagggtgacactttcgagatgagcctagtctattacaaggcccaaggcctaagttcggtttcagcaacagcactgtcttgttttggcgattcccgttgactcgagatgaatttggacatgagaccagatgcgtttgaaaggtagcgatataagctttccacgaagtccaagatcactcaaatcggagttggcatgaaggcgctaggtccgtttgaagtcagtgctgtctccggaggccgaactggacttggacttggaattatcattggagcgtgtgaagttatgagcgtatccgacgaagtgatgtcctcatcacagcggcagcctcggaatcggtgctgatggcggctaccgtagcgacatggggtgggtgaagcactatgcaagctagagttggctaccgtcgctatgcccgccgccactccgctcagcaccctctaccatcggtggccttccaggcttgctgaagaagagaagagaagagaagagaagaagaaaagaacaaaggaagaaatgcggactccacattttttttctttccactt

SEQ ID NO: 51835 - DNA, 717 bp, Oryza sativa
atctctccatcattgtgtataatatcaatacacatacacaattcattttcacttagttaatgctatttctctcttctctcattaagccatatctcctcaattgtttctagccctcaaatgattaatctatggttggaattacctccctcattttctcctctcataaagccacatcaaattacttttaaatttggaccatcattctatatactatttaaattatgataaaccacaataacttatgcaagtttctatcgtctaactatcttacatattatttttatttcttataaatataccaaactcccgcagcaacgcgtggggtttcatctagtttaaaatagatgtattagcacacattgtacttgtttacccatatacactttgtatcattgtatgcatgcgttgtcctagcttagaaaataaacagagagatggacaagtaagtaacaatgcgatgcacatactcttggcattggcatggaactgctagtgctgcccagctgttcaggctcctgagataccttgtccttgagctctttgatgtacttggacgcatctacgaggattgatgtctcgtttgcctgcatataatcatacattcatgcatgctatgtttagattaatataattaaactctcactgctgcagaaaattctattactatcgattcataactggaagcgcacaagtttttgaaccaatagtgtgtttggc

SEQ ID NO: 51836 - DNA, 624 bp, Oryza sativa
tctcacaaatcaaaggccagattgttccagagtttgtagtatgctgacagtgtgacacacacagatgaacacggttgaggagcaagaaaggagagaagagcagggagtggcacatgcgccaaaaggtacagaggtcctatgaccacaccacccataatcctgttctgaagcagcctacctgtaaacagctagcttgctcttctttgcttctgtaattgtgttgctctgtgccagtgcaccccaccccctcgtcctgactactcctgacatcgtgcttgctccaaacaaaagttcacatccaccaaccatgtattacattgatgaacaagcactgcaggttaggacgttttaagttttaattaactgagctgtgcttttactgaataatcatattctgaaactgcaaattgggcagggaggattgaaatccgaaatgcacagtacaggtatatgagctgaaatatcctctaatgaaatacgctctctgggacagttgcacatgtatgtattaattaatttacaaccaagaaagacaaaccgacgcatttgtttcttggctcaagtactgtacctgagggtgatgcggcagttagggcttgttctcttgcccaatttgcacatcac

SEQ ID NO: 51837 - DNA, 2167 bp, Oryza sativa
aagatccagaggacacaaaaaatgctacatatttttttctctgactagtcagatcacaaaactacatggactcgaattctagcccatagaacaatacaaaaaattatacaggccataactgcaaatacatcacggcccataatgatcaacttcacatccaataaaggtcagaaaaaaaacaaaatatcacagggagacccacaccagttcgcacaaatcccctagatcgagcaaaacaaatcgagcacgccatagacagtgaggagaacgagaaaaagaagaagaagccaattcttacccaagaacattgaggtcaagaagttgaaatcaacaagacataatctttcaggtaacaaattacctagcacaaaatccacctttacctttccccattgacttcaccatattctgccagtcatcttttaaatcaaacaaaaacaactcagttctgtaaaaatattggagaaaagcacttggaatagtgaatttcttttggagaaaagtgcttggaataggaaatttctttagatcaagtagttaaaagtatgtaactttttcagaaaaactcgtaacaaaaactatcaatctatagtcagttacagttacaaataacaaaagttacatatataactacagtacatctaaactgtaactgggctgtaaatggaatcattcttaaatttcttaaaaaattcagtacttatactgcgacattaaaacatttccccaattataacaaactctaaattatgttacaaatatataaagagctatctatctatagtcagttacagtgagacataacaaaagttacagatgtaactactgtacatctaactgtaactgggttgtaaatggaatcattcttaaatttctttaaaaattcagtattcatgcagcaacattaaaacactttcccctagtataacaagctctaaattatgttacaaatatataaagaactatttatctacggtcagttacagtgagaaataacaaaagttacatatgtaactacaatacatatagactgtaactgggctaaaactgcaagcatgcttgaatttcttcaaaaaataaagaatttcttcagaaaaggagtcactttgtcacaatggactgaagattttcctcaagtgaaaatcatcttcagacagtggtgtttaacaaagcacaacaattagattagagcctaggataaaaaaaaaacagagcattgtggtccaaacggtcatatctccagttgtgtacaaatttgcccatatattaaattttgtacataatttgcacatatctcaaacttctgtgcacatatattaaaatcactcgacaacaagatgtgacaagttagctgatgcagaagggaatggaccagacagggtgttgttgttgagcctcccgattaaatttcacagcaaatgagttaactgactaacaagctccacacataattaacatgggaacaatattgggatgggacgatgggtcattcagaataaagaagaaaaaaaatcatacagatatttcaggcatgtgaatacctccaggcacccaagtgaccttggttttgctaccattgaaatgcattagatcaacattagactgaaaccctccaaattatttttcagttggctgaagtatgagattttaaaaagctcatgtcgactgaaactgttcaatagcctgctccaagattcaaaaaatactgacaattcaaatagatttacgagcgtgctatcccctgtcccaattcaaaaatagtgccaattatgttcccaagttcacaaatagcgccaattcaaacagatttacgatttacgagcgattgacaatgaacaaaagttcagaagagaagaaagagcagatgcaaccaatagcccataatttctcaaagcaacagggaccaagttcaggtattggcttgctgctaactcatttagatcagcactgaaaagttcagaacatgtacaggaattttataaaccaaatagtacagtagaatacaatctgaagaaagcagaacgcatgtaggggtttggtttaatttaaccaagcaactcagcatactgggaaatcaaaccgtacatctctgaaacgaaatgattcatatgctgcagaaggcaacacaaaacatacttggggttcagttagcatgcatatgtaaaac

SEQ ID NO: 51838 - DNA, 1397 bp, Oryza sativa
atctgacggcttggcgaagggaggaggaggctgtgcggccgctgcttgctacggggagtcgatcagcgtcggggttgcctcctgctcctccgccgccgctcctacagcagcgatggcaggcgcggcggcgaagtggtcgagcaggtgcagcgactgggcgtcctccgcctcgatttgggcgtgttcgcggcggagcggtggtgccgtgggggcaaagcgggtggagggggacggccactcctcatcccgccggtgagtggtggtggtggtggtgggacttgggaatgggacgcggcggtggttaatgaatgagagtgaggaggagggaaagggaagagagagagagagagagagaggcggaagaggaggagagccatcgatgcgggcttttggaaaaggatccaactcgcgggccgggtattttcttgcgtaaggagccaaggagggggtggcctgtttttcatccttgtccatcttttcgtctctctcgagaacatcccgtatcttacttgtcacgaaaatagtcatatttttttctaaacaaatattaacaagatagattaatataaattataccacttcataagcatgcatattaatataaaactagtttaatctatcttgttattgttttaattcacgttcaataccggagacgtatagcttgttgaatataaaattgatgatgcttttaattttaattttgtggttatgtttgaagttgaacaattttgttgtttgattatattggtcaccaaatgaaggatcgatccatggatccatcgtttgttttgcgttttaatttgctatataccacattagcgccggcccgtacgttgtgtgtgtacatgtgcatgcgtaataatcttgccgacgtggcgccacatgacgtccgttcgcccagtctgcgcgcgacacgtgtcctacctgggcccgctccacgcgccagttgagcgcctgtgccaagacaaatatatgggccgagtccctgcacaaaaggaaggggatttgttgggcctagcccaactctctttcattcaaatgcccaagcgcccccggcctgtataaaggcagctacggctacccatctctctctctctctccagtctcctcctccttccttcttccacctcgctccccttccaatccctctctcccccaccgtttctccctcccgcccgccatccatggcggcccgagcgggctcccggccgtggtgggaggcgttcacgacgaacgtgaagaaccaggggtcgctggtcatcgacatgctcaagcagcttgttcatcgggaggaatcggagtcgcgagacgaggagaagctcaaggaggtgatcctcgagatgaaggagcagagcaacaagagattcgcgggatggtttcgctcagagctggcc

SEQ ID NO: 51839 - DNA, 603 bp, Oryza sativa
ccgcaacgatggaggcggcgccactaatctgtcacccagcccaacgacgtccgcatcaactcgcgcatcgccaatctctccgcgcgtccgcgaccgccgcggcgatctctaacatttctccatccgcgaagggcaattaatgatcgggtgagatgctctaagttatagctgactggtaggatcgggatgagttcgaactatgattcacgcagttggattagttactggttgaaatgagatttttgaaagcattttcagcggcgatttgatggcaagatgctgcgttcatttgaaagtatttctgtttaatttgtcaatctgggttgctctgtttttgacgcaaggaaggttactctgttttgatgtttccttttgatgctgctgctaaaatttgatttgtttgctgatgtgatgtgctacgctaactttagttcctgcaccattttacctaccttagtacgtacatcattttcctgacatcctctgcctgccctgatggaacagaacagtagtgattttaagtccgaatgttggttgtgttaaacatagtacgatcgaatacagttgtggcatgatggattcaaattctgcaatgcagtggct

SEQ ID NO: 51840 - DNA, 512 bp, Oryza sativa
ccgccgtcgagctcgccgtcgcgccggccgccacctctcctcctctcccgcggccaccatccctgctccgccgccggtcacctctctctcccccactgccgacgtgcccgctcatgagtcgtgtgaacccggagagaacagaagagaaaaagaaaaaaaaaaggagaaatgtgggacccacaccattttctctcacttacatgtgggtcccacaaataaattttacttattttttataactagtatgccacgtcagcgaaaccatacctctatactgccttgggaccttttatatacggtttaacgtagtttaggggtatacatttctggttttgtggttaagggacttcaaaaaatttcggtgtaaagttaagggatggccagtgaacttattcctaaatacattgcataatggtcgtgggccaaaagcaaatgtactactatcagttagcaagtgggccaaaagggtagccgacatatggatctcaatacgtgcagctcatgagatagaa

SEQ ID NO: 51841 - DNA, 634 bp, Oryza sativa
ttggagtctgctgctcttctctcttatcttttatctcattaaaatatgtttgcagccggtttatagcttgttattgtacctgctcttagcagcaaaatggattggttaaatcatcatatctagttctctggtatatcatatcatacttttctgcttgttatagtatcgaaccaggcccttgggtgaagaatggaaggaaagtggtaacttgtaacacattagccaaggccgtgccaccctccatgcctccggccaactcctactttatacctaaagtcttttataagggtgaaaagtccttatcaaccttctccctatgaatccttcacccattatataatcataaattcatcattttgtctgaataaatttcaaatattgttcttctgaggtctacttatatcttgaaaggaaaagacagtattgtccctcaatatattggtcaggtgttcctttccttggtaatatgcatagtattcatattaaaacagagtttttttgcgagaaaacgcataggacagcaaattttcatgccattttttttttcaaaacatatcacagttttttttaggaaatgcataacaaaatatcatgccaaaaattttcaaaacataggttattactctagttacta

SEQ ID NO: 51842 - DNA, 825 bp, Oryza sativa
tggagtactaatttttcttcaaagttacgtctgatgaattttcttcagtttttttctaagttacctgtgttatactcctacataaatttccttcaatctatgactggcattttactcgacaccctcagcctaattatgctagaagctatagatggagcttcatgtgcctagcaccaacacagaagtcatataacatgtcgccgttcaacatgtgcttttgcagcatgcagtataaggtgtggactgatgacttatcaaatcaaccaaaaccaaacatttgtttctttgtaataatcaattaaacagtgatactgattgcgatactgccattattagaccacgcagatcgaacccccccaagtcatgaaaaagattattcttcatacaaggtaccgttttatccacaaacaggccgtctggcacaatcagcttcgtcaaaatcttgtttctttgcagaatccaagataattaaaataagtagtgagtggctttgatgctgcaaatacaatacaaggcaaggcactgaatattctttgaaagaaatggctgccatttcctttgctttgctttcgtttctgcttgggctcaccactcaccaccagcccaactgctcccactctgcatcttacttctgtgtatgcatgcagtcgagtcaacatacatcaattggctggcaagcaccatccatgcaaggattgagcacaattttctgagtcactaatctttggatgcggcttgtgaaagataccaccatattctgcagttgtatgcaaatgccatatcaattctaatgagcggatatgtgacacaaacacttgaaaacac

SEQ ID NO: 51843 - DNA, 721 bp, Oryza sativa
tccctcccatttatgatctacaacttggtgtgtttagttgatgcacttggtaactgcatgggtgcgcatgcactccttcccccccgtggggtttcctccaacaccggaaaagatccctcaccaccgtaccacaccacactagtacagtatatattatggagtttatcccaaattaaggggggactcgtccaatttcaaaaacaagggggaaacccccaattcaatcaatccggcggggggcttaattaattttgtcgccgggcggccttttcatttccaatccaatccaatccgctccggctaaaccttcaccttaatcccttggatccttgggaacttgccttccgcaactggcgcgcttgccaccgggcgggttccaacttccgctcccgaacccgctgctctctagagcacgacaagacaatccggtcgatcgagtgtcgagtcgaccacagcggcccgctccgtcgtcgctcgcctgtgttgctaggacctccttcccgtgccgcctccccacctttttcccatctccttcaagtcaggaacggcgctcttcagggcgacgcacagcgggctgaaggcgtggctggttgcgtggagaggggcgggggacaacaagaagaggggcagcggtcgccgacgggaggctgcgtcgtagggtggcagtcggaccggagtcgcgcgactgtctcgcggccggccggggaggagtcagcggcga

SEQ ID NO: 51844 - DNA, 520 bp, Oryza sativa
gtacatattcggcccaaaccagaaagggaggattttgattctttttccaattaaataattggtgaaatgatctttcgttttttttttggttcatgttctcaaaccctagctgtaccccagaaaacggttcagtttgctgacccgtatgaggtcatgatttgaattaaatctaattctaattataaagataaaacttatatttgatcaatctacatcgttatatctaaacatggaccaaaactttttctagatctactatgatcaacggcgtatatttttctttaaataacatgttgttttctaagccacaaatatgaataaatatttctttaatactgtaataaaataatttataaatctatggaaagaaacatatatatagtgcttccacacggaaagaaaacatatgttacaccaggttatgaaaaaaaatgttattttaaagttatttaatatttggtgtacttttattttttttcatgttgcaacgcatgggcaccttttctagtaaatatataaa

SEQ ID NO: 51845 - DNA, 656 bp, Oryza sativa
ttcaaattgagatgtgataacgttgatatgtacagcatcatattctagtctaggataactattcgttttacttgaaattcgaagcagattgattctatcagttaatgcaaataacagtcctggaatggtcatctttgtcatttcatatatttgtgctctgtggcatgatataaagagtagtattcatataatttgaatatcccgttgcaacgcacgtgccacgtgttctagtgagactaaaagcgggagcaaattccgcttttattaatcttgctgttctactatcttgctgcacaattttatcaatcttgctgttttacaagcacgtgttctggtgctacgatccccagcttgcatgatcaaagatggagtttcttcctgtcacaagcacttcacaattttatcaagggaatcttgctgttttacaatctgattccaagttgatccaactactgtatgagtactgaacttgcatggtgccatttattcaggactaagttaaataagacagtactaaaaaaacgcaacactatgccactttggtatgttcaggtctttgttagccgaatatacagtgcggaggatggaacagggtggcattgctgactgctactgctaggacaacaattatttggataaactttcttgattgttgc

SEQ ID NO: 51846 - DNA, 1215 bp, Oryza sativa
tcctccccctttctctacccaacttcttagtgaaaaaaacagacatgatttttgtgattcgttagggtagagatcaatgagaggccggtgaagaaggctatgctcgatttctccagcctttcagtctccgatccatcctctgctcctaataaaggtatctacttctacttgtcacacgcttttttccctttcataaacatatgagaccgaagcaacatttttttttctttcaaaagaacatataagtgagatactgacgagaattttttttcctttcatatgaactgaggagaaaattagtactatcaaatattaggacagaagcaacattttttttcctttcaaaagaacatataagtgagatactaactagaaatttagtactatcaaattaagaaagaagcaaatacatttccgcattaattataaggtgaaacggtgagcaccagtgtcgtttcaagcatggctcgaacacaggcctcacactgagctacacccaggttctcacttgtgacaaacttaatcagtaatcacaccagcagttgcttgtctctgaaattgatgctggaagacactcgtcctgataccacaatagtaggattctacttaccagttaattagcctccttgacaccatgataccgctaacacaagttgcatatacttgtactttgacaccgcacgtaaacatgatattcacagtttccgtgcttacagcttcagaggaaccacgggttaagaaacttttggtacagcacattgagacagtacaccttctgaggcagttcagaatgttttgcactctcttctggtaataatcgttttcttttcattacttttaaatttgtctagtcttccacaatttggtttcctcgcatggcataatcagttcagttaatgtgtcattactcatcggcatctgagtatatctcttgttattttttacttttcatggagttatatagacaatagagcaacacaattcttttattgacttatggataccaacattatgcaactaaattgtcttttaaaaaaatattgccagttgtactttaccttatgaccataagggttggacagtggatcacaattacaccattttactttgtagcattctgacttggatgcccaagagataaagagccagacaaaggaatggaacaacagactaagcaagataaagtagtgaactttttcctagtatttacttaat

SEQ ID NO: 51847 - DNA, 1791 bp, Oryza sativa
atgagcattgtctcatacggttcattggaaaaacgtttaatcttaaccatccatttattttaccttattttaatcttaacaccttcatatccgttttcattgtcaaggaccattaaatgtggaaagaaggtaaagaatggagttgccgtctaaaatgctctatcccatgctttgcaagaagagaagacaaaaaattgaaaggccaattagaccagaaaaaccaaaagagggggcaaggcaacccgaaagctaagctagggtttttgccatggctacatccgactcctgagctcccccttctccattcccgatctttactaatcctgcctgaaggataatatctctgatacgcaccaaaaagttgtctttaaatagggtccctctcataactagtttaaggttgattatatcgctagtgcatactatgtgtatctaagtaatcaaaagagtataatcttcttatgtatacctttataatcgaatatatcggtgatatatggttttagtgtgcagcacacgatttcacaacatcactacctaaaatttattttattttgggttggttttgcttattggtaggggttaatggaaaccttaacctttttttttgaaaaccccttcccccattaaaaaagagacactttcctggacctgggaaaaccttctgtgtgaaaaaacttttagtgggggaataggcaagggggcaattttaaataacaaaaggggtccttttaaaaccctaggaaaattactgggacattaaacctaatactatactctttttttttgaaacaaccccatagtatttgacaaacactttgatttaacaatggaaagtgaacattttgtgtacacttttagaaagcatgtgcttaattactcaataggtgttataatacattaatactatggatgttaatataattaaaataatatttaggaccatggtagtatgatacacttaaaaatatgatgatatccaaatattgcatttataaacaagatcttaactggcagccttatttctttcttggggtaggagatgaatcctatttttatatattcttttcaccgacttgtaatacactactatgtaaatactatactcttaaattaagagaagaaccaacatgtactcacttttagttatacacatagggagaactacaatacttcaccattcttttcttgatctcttaaaaaaggaagctctataaagaaagtaaagctaaggataagggtaaaaagaaagtactatgatgaatagcttggaataacctagtatatgctaatattagttgaattgaaaacaactactaaaacaagaataaaatgttgcattaatagtcaaagggtgagacaaagcacataagcatactctagaatatacaaaacttttaggaaatctgaaaaattttcaatacaatttctatgttaaaaaaattatatattgtgttttctttaattgtgtagtactagtagtcggagtaaggagaagcaaaacatgaggagggagcgacacaaaatttactagaggaaagaaagccaaaatggcaaagaaggaagaaaaaagaaaagggaggaagaagaagagacgctggcaacagctgcgtcgaaacgctttatcccttgcctcgcgagaacagaaaaaagaaaaaaaaagaagagaagaggggaaggccatccgaaaggaaattaggctagggttttcgccatggctaccacccaccacctcgagctccccctctccattcccaatctctccgactcctcctaattaatcccgtattc

SEQ ID NO: 51848 - DNA, 544 bp, Oryza sativa
aaaatgtgttcagttcataatgtgatgggtttgcccgcatctcttttgactttttttgtgaatgacagaatgatgcatgctattggcttgttggaaaaactgttttatagttcaaacaaaccaagtttcatgtttgacggagccattgtttcgcttattcacggaataagcgaaacggcatatttgcaaacgaaaagtaatttgtgaataaaacttttatatatgtgttcttagcaatctaaaagcaaaggctgaaaaataaacttcgatgaaaaaatctcaaaatcagctccaagttcaaggttggaaattcaaattttggctgataagcataagcataagcgaaaagatgaggccgtgaggcataagaccaagcatcaggtccaagataatgaaaacttaacagggtttgcttttatacttcggtgtttttttgtggagttggtctgacatacagaactgttgccatgtaaatagagcaggcatgatagattgatgtaatgttggcaacttggcagagaaatcagttatgggctcactgttc

SEQ ID NO: 51849 - DNA, 1124 bp, Oryza sativa
attttaagttatctgagttgttagtaaaagctaaagaatttttgctgactgcatatgatagtagtaacttggaaggtgagtaatctatagtgtattaaccaacgaccagcatgatcttctttgactagtatatactaaacgactgaattgtcgatcctcgtagacatattttgcccatgaacgtccatgtagctactttcgagtttcaatggcgctttccaaggccatgtactttgattaccatgatcatcatttgataatgagcagcttgctaactgcatgtgttagcctagctcccttaggaaaaaggggaaaaaaaaagaaaggaacaactacaaaagacacacatatatacatagtacaaaaaaccagaccggaccgacggttgaaccggaaccagaggtctggatggctcggtttgctgtaaagaccgcccctgcatttgaaccggaataaaccgcttgaaccggatggttttcatgtgaaccggtgaaccagaaagaaccgagccggccggtttgtcatgccaagagaggatgggccagtcaatgccttgtgcgcgcaaagatctcaaggcccacggtgaatgtgtactattgaaaatagcaagaaaaatgtggggaatggggttcgaaccctggttggctggctgttttcaacggaggatatgcaacaatataacacttccggttcaacattcgaaccgtgtgaaccggcgggtgaaccgctggaccggtgacccagggacttgagcgggtcgatcaccgattcggttttttcaactatgcatatatactccctctatcctaaaatgtttgacgccgttgacttttttaaacatgtttaaccgttcgtcttattaaaaaacttttgtgaaatgtgtaaaactatatgtatacataaaagtatatttaacaataaattaaatgataaaaaaagaattaataattacttaaattttttgaataagacgaacggtcaaacatttttaaaaaagtcaacggtcaaatatttagagaacgagggagtactatgcattatgcatatatatgtaggcatgcatgatgatgctttagctttacttaagcgtgtataactgttggacgcggtccaagtgttctcac

SEQ ID NO: 51850 - DNA, 600 bp, Oryza sativa
gaaatgatcggttaggtttggactatagcacgatggaacttgactgaaagactgaaaaggagtttataactaaaaaatgaattggatgagtaaaacgaaaggcaaaatacattcaaaagaaaaaaaaagaaaagaaaggcaaagtcaatatcgactcttgtacgtggaagtatagtgtgtgtttaacttgagtaggaattgatgtgacaagctaacaaaatttatggacctttctatcatcatcatatacgcggttgatctttttgttgatggtgtagttggttcagctagttaaatagtaatcacaaaactcgaaacaagagcgtcgatatgtccgagtggttaaggagacagacttgaaatctgttgggcttcgcccgcgcaggttcgaaccctgctgtcgacgaccatttttttttaggctttttaatctttggaaaaggtacaccgaaggtcccccaacagcccaacttatcatcgaattaaaaaatagtccccctaccgcaaaatcggatacaacgccaacaacccaacttattatcgaataaaaaaaatagtcccccaaccgtaaaaccggatacaaagcatcccttaatttac

SEQ ID NO: 51851 - DNA, 695 bp, Oryza sativa
aaaacatgtattatggttctaggaaatgcaactgacctttttagatcgatgacaaggagccgaggatgaaataggccgagtaccctgagcctcagaggttttgctagtcagaattcagaaaaacaacaaagaaaagtgcaattagtatttcagatattaaagtgcacccactgtaactatttgttggctgtgaatgaactaacagcaccaccctttctcagggactataatgagccttacaatctcaacatacagattttttttacgggaaatatacagattcttcacagtaatgcagataggatgcccacaatttccttgacaagatttgcaattatctgggtaggaacataacagttatccttctacttgagtcaaagtacagccatacagcatcatgctaaagtggtgacagtgattgtcatggaccttttactcttattgtaccatttccaactgcaatgcattgagaaagaacaaaagtctggattacttccacattcagtttaatggaactgattttaaggttaaaccaagaaagtgatccaagggcccaaccaccccagaccccaccattagaagattgcaggggctttgtcccataagtcaatttgcccaacaaggtaatagtgccgtttgggatgaagcaaaattattacgaaatgcaagtgaatgaaatctgtagtaggtgcatg

SEQ ID NO: 51852 - DNA, 1146 bp, Oryza sativa
tcacatatctaaataataattccggtgtcctcaagatcactacagaggaattatgtgggactattgtcaaattgtcactgcccccatgctattatggcactattaaaataaaccgtagaaaattacatgttaacctctctagaagcaaaaataactctaaagacgtgaggaaaacggtatgggtaggagggttattaattgatgatgtggtttggttaaaatattattctgtacttggatttatcaagatgccattctcgattaggggagtttcttaacaacaaaatacgagacttttgcatgattttaaatcttacattaacttttgcatatattcatttcgatgaagaatgggtatgatcctataaaattcctgtgaaatgcctcattcaataaaaaataaagacctgaaattttatttgtggtatctatctatcatccccttctcaaattttagtgttttattagtagctatccaaacggctattcctacgttaattttcatgttttgtaatgatctgttttgccattgaagtcttatgaatttttctttttttaaaaaaaaatcatcatgttcctgcgtgaaataaacaagccttagcaaatgtaaaatacaatggctattgattaggccttttattttacttgttactagtaagaaaaaacacaacacttgtgaaacatgcgaggcaaacatgaacgaggcagatgccatggcaacagaagaaaagagaagaaaccatgtgagtagccaacagacaaggaagaccaaagagtccaaaaccgatagagccaactgttgggaggaagcaaaaccaacaaccttggggagccttgtagcaaagaaacggcggcccacaagaagaaaccaaagcagcaggtggagtgaaacagacggcccgcccactggtttctcagtagccacagttttgctgacgttctcttttatctgtttgcttcctataaattctacgcgatagcttcccatttctcatcactgtctctcactctcactcccaaatcacatcctcaaattcagattcagagtcgtcgaaatcagtagtattcatcaggaatggagcggctgagctcatcggtgcagtcgtgggtggagggaacacaagcttcgccagcatcggtaagcaa

SEQ ID NO: 51853 - DNA, 959 bp, Oryza sativa
aaaatttaatatctacattctatgaacagactgtttttggtaaacggtagttggccttgggctaaatagacaattgtacgttgcgttccattaaaaggaaatcccatgctttctctaacttaattgacaaggcattctcttagtcccgtaggattaggactcaacttgaatgttctgaatgaccgactgttcactgtacattaatatgcacttcattttgtaacaaggacgtaaggccattttagtcaatgtactgaaacaaaaaagtgctaaatgcacctactacattcatgagttgcatattttgcattatcttttttttttctctctgtggagaacaaacgtgtactgaagaaagagagagagcaggagaattttaattcccctggctgtcttagttagcaaccaccactcattacaatacattagtccctgaaaacgaaatagccaacacaccatcctcctctctatccccctgtcgtcccaagcattcgtttttatagcctcaccacagctcaaaaacacaatgctagcgttgctgttcacgtcgttgccaagccacaaggagaaggaagaaggaagagaaggcagaaggaagcagcaggagaaggagaaggccagaagaaacaatggattgctgcgtgtgcagtcccatggcgtccatgtacaggcttccaaggaacgccatctgcgctgcgtgctatgaaggtgccaaggccatcatcgccttcttcaacgacgacgacgacgagcacgccgatgctgatcaaggctcggtgaagcccagcagattgacaaagctcaatagcacaaccaaggtaagaccttcccatatctcattttgctcctttattaattagtcctttaggattggtatgactatgttcggtttacaaccatctcgattgtgccgtgtgctctacttccatgaaaaatctagccttgcgtgtttctagatt

SEQ ID NO: 51854 - DNA, 1193 bp, Oryza sativa
catctctccctagatctctctctgtggggaaacacaaatcaagagagagaccagctgctagcttagctagtttgtaatgggcatctcgatcatatatatagatcgatcaatcagaagctcgcatggtcattatatatatacgaggggggcctgaaatatatatatatatatatataacgagtgatatcgatgatatgcatgatgatcagtgggcagtacagtactttgctgtgtcgtacgtatggtattgataattgcaattgttggggtgtgcacatgatcgatctgcagtactggtgtgttgcctgacagcctgaggatggatcctaagacaaaactaatactctatcttgtttttccttgtctctttgccttcttcgttttgttctgcatgcacacgttccttactattttattttgattattgcaagaggatcatccactctgagcaatggagtttgagtagtacaagcgaagcgagaatcgtcgtcgtctcagctatatatatatatatatatatatatatatatatatatatatatatatatatatatatgcttaattagctcatttattttccttctaattgataacattatatgtcgagacgacacacggaaaactaccgactacagtagccttaattacatactcctacttataattaattagcttgatatcgaatatcgtacgtgttgcaaatcactctgctttaaattctcctgatcgagctcctgtcattttctttatcccggatcacgtaaatgtacgccttttatcaggcacgtagtgattagctagctagagctttcggtccaaccgcgtcaagtagctttcacccaacaatatacattagccaatacaataaactgataattaatcaatatatacacatcgaacacgtcttgttacacaacatgtatacaaaatgcaaacagatcaatttgttttctagtgctatctatgccggggagaacatgtcacccggcctaacctaacgtgttctcctcctagctcagaaatatatactctctccgttctaaaatataagtattttttagcataatgataagtcaaacattttaaactttgaccattaatagcaaaaaaaaaataaaaaagatcaatcatgtaaaattgatgttactagatttatcattaaacaaactatcaaatatacaactctttttatt

SEQ ID NO: 51855 - DNA, 707 bp, Oryza sativa
aacttttgaatgggccatgaaatgctttaatccaatgggtaaatgagagatcccctttgattctgttaattcctttttcattcgtgggatcgcatggtgagctctaggataaatgtcattctcgtatccccaattggatttagttaaccatatcagcaattaagcttgcaaaccacattttacatgtagtaccccttgcaaagagagattttccaataaacgtgcagcgggggatcccatccatctttctacctataataaattagaaaaaagagaaagaaatggagacacaaaaaccggacagaaagaaaagctgatttgagtatggttgtcactgaactgcatgccccgagctaatgcttctccgattagcaacttggcactagtgcaaccctttagttgcttccccatgcaaaaaaaaggcccacttggaaggggtaacgtttcccttggaacgaaccaatcagtttttttggttaaataaaaaaattaagaaaggggggcatgcacccaccccatttatatttctaattgtagttaacaaagtgagagctccctggttagaccacgtcttctcctcagcattggcagcccaaccccggcatgcttgaaatagatttttcaacaaagtttgcttaggaaattgcagagatagaaagaacaaatcaacgtaaagagattttgcactcgatctggagagctgcaga

SEQ ID NO: 51856 - DNA, 1231 bp, Oryza sativa
cacgaaagctaaattttatattgcaatttattcttaatggacatcaaaatgacacgtgttttcatgcccaagttcttttagatgcacacctattgaattgattatttggcacagtgcataaaatagaaatggtggcactaaaaaaagagccagtcaatgatggaattgctacaagggcccttaacactttataaaggtcaagcctgccttggttattcatgaatagtgaagaaatggtatttggcgcttgtgtcacactatcacctatttgtttgattagaattcataggagacgaaaagacaaatgcaaaagcagtctgtacccttgaaacagtgaagccccattctggaagacgcgcaaaggtgccatctgttctgtgatttcttgagatgagcttccagtattatcaatttcaccaggagatgagtctgctgactgttcggaagaagcctgaaaagaggatccaccaacagttgacgcaggtggcagagttgctagttcttgcccttcctcagaaatagctgtgcaattaatcaaggagatgcagcagaattaccacattgggtgactattttctaatgaaattggcacaagagaagagagtcattcgtcgaagttatggagaggccaacctgtgtaaccagatacagggaggcactgggtaagatatgaggccgtctgggccagataagacgcagcttggtttaaagctgggacggagaggaagagctgtgaatcttcagtcctgtcggctgaatatctagcatcaacctagatttatcaataaacattaacaaaattggaagtagaaggcaagtaattgtgtggtgtggcaaacttttggcaattaaatgcatacatggtacaaccggagaacgcacataccgatgatgcagaagtagaaggctgccccagcgttgaaggcaaatcctccatggttggctctttatccatgagcggttgtactacatgtgaagcaacgagaatagaaaatgcaataagtagcgaagaggaagactatggaatggaatgcagcacaagttgatgagatggattggtagcgagcgtgtgaggaagtcaggattgagggtatctcaattactggtgggcaagcctaaagtaataaaggaagggaaggtatcccatccatcccccatctgatctcttgagaaacacgctcatatcgtttacccaaccaagttaacgagtactcacaaattattgattcat

SEQ ID NO: 51857 - DNA, 799 bp, Oryza sativa
aaatatgcatatttatttggatgtgacttttggaaagtatcatttaatggtaaaaaacggttattacaccaaaagttcaatcatagctccctgttctatatgtacctttcgaattgtttcagtgacagcaacagcaacccaagttggccataagcagggcaaccatattcaatgtggcaatgaatggggatgcacagatagcaactgttacaccagctatggtaaggatacgaccctgaaatagttgtttaattcataacaggaatcagtaacgaaatttcgagattttttttttcgaaatgaaagaagaaacaaaattagcaaaacttcctcagtcattgcagttttctaacaacttgttggttaggacatttttaaattatatggtttttgccaatgctaataagttgctcagtacttggaatgtagtgatgtagaacatgcaatacatcattttgactacatcgtaatgaactcttcccttcttttgacgatatgagatgcgaattatctcttaattggcaaactgaggaacatatgcgtgtatcagaattacatcagaattcagaaggaaaatctattgaaattttgacacattcttgtcttcaaaagaacaaagagattcctaataataggtcctgggggataaaaaaataaccctttggggtacccatgcctaacaatagatgtttaaatgaactgagcttctattgagccttccccaccaaaacaaaaaggagggagagcctaatgagtcaaaatgttcagtttgcaacatataaagctacttcaccatgac

SEQ ID NO: 51858 - DNA, 1537 bp, Oryza sativa
tttgcagcatgatcaatatacatgacatgaaaaaaaattaaaatccatacatccgtgcatatggtgtgtttagttgtaattggtctgatcagcttttttggtctcgtgagctctgactgtgctccctccaaatactcttaccttctctcatcacgggttctcatcaaccaatcatcccttccaatatcgatctcctgcagtcttcaatttaattctctctccccacagctagctagcgacatgtttctaacttctgtatatcgacatgcatacatattgcagattgttttttttaaaaatatactagcaaaaatatttgtgcgcagttgaaaacaattttcacgattgataaaaactttatcaatttaaatgacaaaccgaaacaaaacaaacaaaacaatgacaaaacaaagtcagaaatcttttatagcattgagtaagctcgcttcatacatcatcatatgaagaatccttcatgtatactgttctatagccttacatatcgattgggtggctattccataagttgacgcatgcgtattttgctataccttattgaccaaagattaaaattttaattattcaatttacgaaaaaatattgttggtggaaagcattcgcaaagtaacaaatttgcagcatacacatcttaaacaattataattttaaaagaaaaatatttatgaggagagaagtttggaagagaaaagaaaaagaggaaaatagagaaaatataagagattggaagaggatcagggaaaaagaaaaggagaaaaagaaaaaaaaatagttattctagactcacatcgaattagatgaggacgacctataactaacttaaaaactaaatgaaatacggatgacgtaccaaaattttgatataaataatcttcagtttttataatagcatagatatatctagcacatacttcagattcactcataaattaatacaacacaactagtattgagaacctcggcctcttaattttaagtttctggtgtctgtgctatgaaccactctcaattttatttttcgttatatatccgacatggcatatgttcatcatatcggacgcttgaaagtcgaaatcgacatgtgtgaatctaatagtaagcacaaataatcacatgtacatgttgaaactgtgtaaagcagccacatgatattcacattttgaattatggtagaataatagactgaaaatgtaaaatacaattaaaatttacataccatagtcttcagaaagggtgtttggtgtagtggtatgattctcgcttcgggtgcgagaggtcgcgagttcgattctcgcaacaccccttaatcgttttttttttctttgaagccctttttttttcctctctggaactgctctgaattcatcctgtgtgtcgactgctgttttatttaacgctaagtttggtgtacatcttgggcttgagacgacagaatataacattttgtcatcatcgatccatggcgctcgtgcatatagtgcagtgcgacagtaaacaaattaacaagagccgtagcaag

SEQ ID NO: 51859 - DNA, 568 bp, Oryza sativa
ctcctcctccacctcccctccccgccgcttcccgtccccaaccctctcctcccctctccaaaccctaaccctaaacccctcccaccccaatcccgtcctgtcaatcttgtcatcatcctcaccgccgccgcccggggctccctccctcccgcctccggattcggattcttcaagcttgcctgccggattcgattctgatggcttcggggtgaccgcccgcgaggagggaccaagcgtagatggcattgggggatctcatggcctccaggctcgtccactcctcctcctcctccgccgcgccatccgccgccctgcccaatcaccataccaaccacctcgtcgatgaccacctccccgtggagaatggaccggaccccaggagggacgtgcccgacgaggagccgccgcccccgccgccgccgcaggtcgccttgctgccccaggtggtcgtgctgtgcgagcagcggcacgaggggttcgacgaggccgccgctgcggcggccgggccctccaccagcgggcctgtctccaaatggcgccccaaagaccgggtaatggatgctattct

SEQ ID NO: 51860 - DNA, 834 bp, Oryza sativa
cattttattcttcagcccataaccgagccgatctatgtgcagcccatgaaacgagcgtggcccagcagtgatgcggcccgatgatggaggccagcccgacgtgggagcgatctaagccgttcattttgatggacggctcagatcggctcctaattcatcgaaacccccggatcaaataaccctaaccctaattctagttttcccctttctccccccccccccctttccctcccctccacgcacgccgcctctctccccacgggcggccgcgccactcccccacgggcgcacctctcgcgcccctcccccaccggcgacgcctcttggcacccctcccccacgggcggcgcctttccgcgcccttccccacaagcggcggtgggtggtggctcttcgccagatctggcgccggctctttctctcctcgtcgagcaatggccgtcgcccctctcctcgctagatccggcgggccgacggcaaggttgcgaggagcagcgcgcggcggcctccggctcacccctccatctcatctcgtcatctcatgttaatattttggatgtttttttttatgattccgatttagatttggattgggattttgtttttatttggattgtgatgatttgagatttggagagaaggtgtgcgtgcgattctgtttgtgcgatgatggaattccgactggatttgggggggggtgtttgggggacaaaaaatcacggcacaaacgaggtcacgaaaggaaaaatacgaatcttttaattattatattatattagttaagatctatacctacctacctctctactattataaaaattaaagatgtttttg

SEQ ID NO: 51861 - DNA, 1166 bp, Oryza sativa
  unsure (1)..(1166): unsure at all n locations
aaagcaactgtacaaacgcattaggagtacaaagatgaatcaccatgtttattttagataagctttctcactctagaacaatcaacaaataataaattttattgatcaagtccctctcctccacaacttacaggtccagcatcttataacgcagacccggaaatttaatcctctacaaccaatcctcaagttttcacaaatcaaacgttttaaatgcataaaatcaaactaacccagaaaaaaattaaaaatntaaaacccctttcccccattgggtataatcaaacgaaaatttacggggattttacagactatcatgtgttaaaacccactttgcttgtataacctctgttacaaaataatcacccttttttggcnnnntnaagcagaagctannagatntntncttaatganttcttnctaacatttgcacgtggggagaaaaaatacaacaatactgggagtgcatcccataaacatgaaaaaaaactgccagctgcaggcagatgtaaattttccccctcactaaaaatcaaccctactacatttgaccaaatggttacctatccancactccttttttgcacaaggggagatttttatcacatcccgcggatcaacactaatggttaaacacaacacaagtgccacacagccagttttcatctgcactaccaaaccaatattagtaaatagcataaaagcaataacatccaccagtacccccgaaaaaaaaaaggaccagaaatacaaatagaagtatatagaatatccaaaagaagcatccagaagaaaacaaaaggtattgggacagatttctgaccaacgtagacagtcatttgaaaagcaaagctatttgttgatcagctacttntagataaaantgnccacaaccatgctcccattaattggtacatgggctctccatcatgtcaagtaatttagaatattctcttttttttttatgaatcacatgccacaaactgggttattaaagttcaacacaatggtcccccccccgcccttttttaaaagggaattaaaataaaaataagatgcaaatcccactagggacatcagtcatctgaagaggaaagaaatagtttaatcaacatgagtgttcttatgttggaaccaagcatttccacgatgtccaaaaggatat

SEQ ID NO: 51862 - DNA, 747 bp, Oryza sativa
taagttacttactctgtcctaaaataaatcaatctacgtgacgatctgacacaatcacacaatctctttgtccagattcattgtaccacctagattggtttattctttatgtattatgtatttattaggtttattatatataatatttaagttttcgtataatcaagtagataatctatcaacatacatatgcgagcaatatgtttgaaacactaattctaaaagtacactttgaagtcaaggacggaggcaggagtttgctaacctaaggctcaacaaatgtaacttgttagattttcaaaattttcaattttttttggatgaatttaaatgggattgatttagcaagcgcactttatagtcgttatattccctcctgtccgtggggcccacagacagacaggcaccaagcagtggcaactggcaaggccactggttcactgggcctggacgcaggcaggatggcaggagacaggagtcccagcagccacacgccacagtgacccactcccacacccaactcagcaatgcacagccacaaaaccaaaccacgctctttctttcttcttcttcttttttttttccttttcttttctctttttttgcgggagaaacctcgctcatctcatctaagccaccatcttgtttttttctgaacgaaatttaccatttcatatggatttcctctgctatgttttttttatttgttcatggctcacggtgctcttttttccgtacgatctgtca

SEQ ID NO: 51863 - DNA, 564 bp, Oryza sativa
gctccgattcgctgtacatcgtgagcacggataggcccttcaatttgggtcttatatacgccatcgagctagatttatttccttctcgttttcttgccacatttgatcgcgaagccggtttggagaattttggagattctgctcatgttttccagtgagtgaaatgtgactgttgcatcggctggtgccatgtgaataggtatctggtagatttggattttgttttcttgcctgcatcgaacagtacaaaaatcttacgatgcattgcaagtttgtagttctggtcttctggaatggtgaggtgttaactcttaaagagtaatttactcttcgaagaatgatcccattcccataatgtttgtttccgatgaagaaaacaagtagtgaaagcagtagaataaactttctagaatctagatacaaagatccatgttgcgtggacgcatgtgtccctgtcggctccaacaacttcaggggaaaaaaaaggtgaacctaattctctcctcgtccttggtcgaactcatccatgtaactagtaccatgtagcagcagcaattcgcattt

SEQ ID NO: 51864 - DNA, 655 bp, Oryza sativa
ccttgatctggtcctctcagtgccagctcgtggcgttgaattctttcctcgtggcgtcgaactcttatcggtgattacatggacattcctgtagaggttgttcatggagccaacttttcttgttgcagataacttggatagagcctgaggccgccgctctttcggaacgtccttgggagaaagtctgactcctttgtgatgatttcatttgcagtgcatgaggattcttctactccttggcttctttcttgaatcttgattgtgtcaacgatgtcacttataggatgaactgcaacctcttccgcttcaatgcctgaatgtgactctttggtttgatcaccatgtggtgcatcctctgcgtttcttccaacctgtatttctctttcactgcatatatctctgtgattactcgatgtggagaacgaggaacaacttgatgactcttccaagggatgtgattgtacttcttcctttccaatgcctgaatgtgactgcttgagttgatcaccatgtcgtgtatcttccgcattttccccaacctgtattgctctttcactggatgtatctctatgattactcaacaacgaggaggaacaacttgactcttccaagagatgaggttgttgagaaagatcactgcttggaggatttggtt

SEQ ID NO: 51865 - DNA, 529 bp, Oryza sativa
caatgctagaaagtcttatatctgaaatggaggtagtacttttcaaggatttaccaagtactcaaatgaaactgggataaacatgcaaaaagaactatgaaacataattaccaatacttagtactccctccgtttcacaatgtaagtcattctaacatttcccacattcatattgatattaatgaatctagacatatatatctatctagattcattaaaatcaatatgaatgtgaaaaatactagaatgacttacattgtgaaacggagggagtaattagtattacacatataattgaatagaagtctcaacatatatttttatggtcataatattttgtaggctgagctaacagttctgagttatgcacttcagcaggcgaaaactgaataatgcgagaataagaaaaatctttgatggtaaaaagataggttataaaaatcaggttaaaattctcgtgctgtaaaggacaaaaacccttcatggtgataagaacaggtacctgtagtcgtaggtcaagggttccccc

SEQ ID NO: 51866 - DNA, 797 bp, Oryza sativa
acatcatattccaaacagatctgcatcagttgggcagcacaaaaaagaaaagaaaaccacagtagtgagtagcatggtgatatgggtcagagacaactaacctgcatgatggctgacgggtttggtcttgatcctggacaggatagttgagatccctggagtcagaaccaagctaaaattaagagaacacaagcatgaattagggcatattccacagtaaacctcagtcacaaaacaattggtatggggcacaatccatatgaaaaacaaataccaaaagcacacaattgatacagatatgcaaataagaaaataaaaagttaagaggcagaaagtgcaaaactgaactatggcaaacagtatgccagcaattttacacttgccgatggaactggcacatgtgggatccatgattgccattcactcactcactcacaccaagcttgactcaataagaaattcgatgtgatcatcatgcagtgctcatcaaacttcttacaactatgtacagtattatcttttaaaataagtagtgtgcaccataaaacactattactaactaggtcgtccttctcacaacaactaatcactgaggatatttcttcatcagacagcaacgaaatatagaagtgtactgaaaggaaaaaggttttttttatataggcatagacattctagttgtttcattatgcttaggaggacactaataaagcagaactttccatctctcatatccaacacatcatttgtttgccgtacatacaaaacagggaaaggatcagtgcaagcttgagtat

SEQ ID NO: 51867 - DNA, 1449 bp, Oryza sativa
agcatatgcgacccgttgaagaaatactcgtcagttccccgttcgatgttctgtgtgatggtgatggtgttggggcgaggcggtcctcttgtgttcaactctgtctttacattctacttcctctatctcacattatatcacattataagatctatttttttacatggttttcaacgatataatttgattattaattatttaatattatgttatcaataactataaaattagtataatataaaatattttgaaatatatagtatgcataatacttagtataaatattgctagtgtaattgttagtcaaaatttaacgagtttgattttcatagaaacaggagtgctctataatttgagacagagaaaagtatttgctaacggtgacatactagtgttggcatctcgaacccaatatggcagagatagaagagaatgcagagagagggagatattgcggcgaaaaacttgcattacactctatgtattggaaaataggcaaagagttggaggcgaggaggtgtggcgtggcaatagaggagtcgggtgattcgaattttgagaagcccagtcgtgatcactgatggaagtgtaggtagtggaagtagtggcatgaggaaaataaaaaggtgtaagtcatggacggacaattaggagcattgtctaaagatacacagatacacatttgtctaggcgggcctctttatgaccatcttatgtgtaattttcacgtgcattaccttaagtggcacacctatgctattagacattaatgtgagttgttgcctaagacattttgcctgtggcacacctatgctattagacattaatgtgagttgttgcctaagacattttgcctgtgtaaatcattgtaggcgaaattaatgtacgttgttttcttttagcatcatattagtagtccaagcctccaaggtagggcctatgaaaattcttctttttttaagtagcgatcgtccaagatatggcaacttaaagcaggttcttttctcttaaaaataaagatgaaaattaagtttttttacgcaaaacgaggtggtattaacgtatgattggttgagttttaattattacaaacttgaaaaataaattaatatgacattttagagcaactttcatatagaaagttttcaccaaaacgcaccgtttagcagtttgaaaaacgtgccacgaaaattttaatcttcatccaactcttgttagaaaaaagaacatggcttactctggtaggactaccaggtgaaaaccttatcttggtcctccttgagacctcaatagacggcgacggtggtgctcatcatcgttcatctcgctggagacatcatctaggtcccttgccaaaacttccctctggcagctgatgcaagctctttctagttgttttatcctcttgcaactgtgtcctagcttatgcaagttggccacgttgacggg

SEQ ID NO: 51868 - DNA, 752 bp, Oryza sativa
agggtggtattaactatcaaatgtcaattataagaagtacaaaatcatggtccattgaaattaggaataacaaggactaccactagtaatagagaccagaaggcaaattgcttcccagtacagatgattcacatgagacacttttttagtgaaagatgcacaaaacatatcaaatggcctgcttagtggctagtcatatttttgcactacaagctaaatcaaacatagttaagcatgcatggtcaactggattagaaaacaaaagaaattgagtaagaaacaactcaacgctaagacaagtgggtggctccgagaatacaactaatatttgggaggacacaaaccaagttttcagtttatgtgattcagtgatcactgaggaacaacatagactattataactagaacactacagtttataaagtggatgggggaacaatcttgaacatggaacattatctattcgtaacatatggataatcgattaaaagttttggaaaggggacaaaaagcaaaaaaaaaaacaagataatcacagacacatggctcaccgaattaaaagatgcattctcttcatctgctgtcctatcccatggaggtcgataccattcctcgatccgatctttcacaggcactctaaacatggatgctcctgcaggcattgccatcggtcctcctaccaaagctcaccatgaggcgaagggaatgtgtcaccgcggaccggctggaagctgacggacaatcgcgagggc

SEQ ID NO: 51869 - DNA, 1093 bp, Oryza sativa
atgggcttataaaaaccaatgctggaaaataaataatagtcttaaaaattgaaatcaactttagagaaggacccttcttgttctccaacaaaagttggattaaactttggatactcgtgacacacgtttttcaaattgctaaacggtgcgtttcgtgcaaaaactttctatatgaaagttgttctaaaatatcatattaatctattttttaagtttgaaataattaaaattcaattaatcatatgttattacaacctcgttttacgtgaaacacttaatcttcatctttatctttatcttcagaacatttaaacaccataaattttacgatcaaattttgactatggagggtaccatgggagaggaaacatacggatcccacaattcgtacagtattgacttctcaagtcatctgcttctacagttccttgtaccaccaccttgttgttgtgtcctcggccgatcgagaccctcgagaattcgtttcagctctgatttcgcggcgtcatcgatgctgcattgctgcgtgctacagccacgcccttgcacatgccgccctggtcccgtcgtgtcccgtggactgtagcgacgacgtcccactcgatcgggcaaccgccacgaaagcccaccaacgctttggacggaggcgcatttacgtgccgcgtgagcgggcccgtcgtcctcccgtgcacatggcacgtgggccccgcgcgggtcgctcgctactacgcctacgtgaagttgctggtcgccgcagcgctggcttttggtgttggtggtctctggctgcaatgcgtacggtacatgggagggaggttgagctgcaatgcaaaggcacgtatggttgttttaggccatttctaatccaagacactagacatagtttaaataaacttcacattattaagaaactagtactagacaatatttttctaatgcaaacaccactattccacacttaaatttaatgctacttatcccacatgatgccttggatgttgtatagaaacagtgtctcatgcaagacatggtttccttctctttcctcatttattcacttgccacatcattttttatcttatgtgacagctta

SEQ ID NO: 51870 - DNA, 792 bp, Oryza sativa
acatcgctcatccaaacatgcccttagtttgtaagggggtgtttagatctaggggtgtaaagttttgacgtgtcacatcgggtattatatagggtgttgcattgggtgttcaggcactaataaaaaaaactaattacagaatccgtcagtaaaccacgagacgaatttattaagcctgataaatccatcattagcaaatgtttactatagcaccatattgtcaaatcatggaacaattaggcttaaaagattcgtctcgcaaattagtctcaatatgtgtaattagttattttttagcttatatttaatacttcatgtaggtgttcaaatgttcgatgtgatatggtaaaaaaaatttagagtgggatctaaacagggcttaagtaccttgatgtagatgtggaaaaaagctcgaagctcgtggtttggattggctcatggtgagctactgagctcgactctgattgactcaaacccatggtcttaatgagttgagccaagctagaaatttaactcttgagcttaatgaactagcttgtgagttgctcattactacaaaagatcaccacatcttcatatatacttagtgtttcttaactagcgagtagtgactagtccattagttacatcaaaactatttgtattttgtgaattcttcactagtgtttattattaagtttatatgttgtaaacaaataaattactaattataaaggtgatataaatacgttaacaagcttgacaagagccagctcatgattttttgctcactttttctctcacttctgtatt

SEQ ID NO: 51871 - DNA, 629 bp, Oryza sativa
tcagttctagcttcttgacagccaaaacttgggaggccttccctttcggccatccctgccggcccatatcaattctcccagcccatcccctgaataggcccaaatttgattcgatctttcagcccatctacgggaacaggctgggattgtgggcctcccgaaacaccctggtcggagttgagagttcagacgtcgagctcgaactgaaacatgggcgccgcgtacgcgcccaaatccccgaacaagaacgtgtcacctccgggtacccgaagccgtcgtcgtccagcccgaagtacgtctgcacgtcgtccgggaagctgcacctcgccgccgccaccgacgacatgtcgacgttgtactggtcgtccttcggtacggttggctgctgctgcggcggcggcgatggcaatggcgacggcgacagcgatgacgacgacgaagaagaaggtgagtctgtgctgctgctactgctgctaccagaggacgacgccgccgcggccggcgcctgctcgatgatctccttgaacttgggcgaccgcagcagcagtccgatcggggaggtggacgccgcgcgagccaacggcctcagctggggcgggagctgcgccacgaggtcgtcgtcgtcgtcg

SEQ ID NO: 51872 - DNA, 699 bp, Oryza sativa
aaaatagactgttaaagtaagaggagtgcatgcggtgaagcaataccaggtttgactggcctatattttctcttgtcatgtctttgtcatgttcaagttcttgctcctcttcccattccttgattttatacattatatttcaaactgttcatccatacttacatcactatcgtggagttgcaagaaacaatgaaataaagagaaataaggttgtgtttttccacaatctcgcagacaaaagaatctctcctgtattttcttgtggatagcatgggcacaatttaatgatttatggcagaccgtagcaacttccaacaaatttggccgtcagaatagaaggcggcaaatatgaacttacaccaacattgttcagttatgatgatttatgagcagtcaaccaaatcgatgatcaatcctgtagtgctgctagggcatgccacggtctcgatctgatcaactaggttacttttttttggtagacttaggttacttttatttttgtagactaattaactgggttacttgtgattgtgtgtagccagcagattttgacatgaaaacaagcatccatcctggaccggttccagtttcagttcaggtagcagacaacacagacgtaacaaagtagcagacagcacaacggacaaatcagatgctgtgggttttgactttgattaaattatgattcaagtttataaa

SEQ ID NO: 51873 - DNA, 1265 bp, Oryza sativa
tcaagtaggaaaatttcctataggatttgaatcctataaatttctagataaaccctttgattcaaaggggcccaacatgccgtagcactttggtcgctttcgtagtgcagctgtgagcctgtgaaccaacacgtgtgcaaaatgaaatgtacagctgactgccgacacggaacacctgtccgaatgactgttttatatttttccgactgaccacgtacacttttcacatagattattttgttaataaaaatgttttacatcaccggtctttgttatacggcacacaaacagtggtatttttactgaataaaaattatgttgtgtgatgggaaaaattctgaaagagagagagagagagagaaaaaaaaggccagctaaaaaggctacgaagaccagttcaattatatcgagtaagggcccattctaaacagagtttgaaactttgaaatgagtttataagccatacgcaaaataagaaaaaatattactccattagataattaattaaatatatttactgttataaaatttaaaggttaatatttttttaaagaaaaatctttccaaagaaatctttatagaaagttttctttttgagaaaatatagtgtttaattatttgggaagcgtgtggtcgtagttgcgagtaaatagctcccccgtaagctcaaacatactccctccgtcccatcccagaatataacaacctagtaccggaatggacttatcctagtactactagtctatatagagggtatgtgtgctgtgtgcctaagcctacaaaaaattttacgtttataggacaacgtataaatataatcacacatgagtgctaactttaattattcaataatcaagttctacaagtatatgcatgagtatacccaagaaacaagggttttgattattaattcctccccgccatccccttctcatataaattaagatgatgttgtttataataatttaaattatatatggattggttgttcaaaagccgtggtttatgagaaaaggaaaaaaaaaggtaatatagttaatcatctagaggtaaaactaagaaactaaggtgacatgactttataagacaagaaaagaagaaggaagataattaaggcgacatgactttataaaagaagaaaatgaggaagataattagaccataaataattaagatgatatagctcaacgagagaagagagaaatggcattaactatatttagtgtgataaggtaaaaaaaattgtctctgagaaccgtaaaact

SEQ ID NO: 51874 - DNA, 515 bp, Oryza sativa
aatataacgaagcactaatgtaagagttcaaattgactaagaattctgttatgattttgctgtcagggttaatacaatagatcatgcattcgattcccagaggtgttgagggatgttgtggtgataatttattactccactagttgagcacaaaatttgacatgactggattaacaattggatatagaaaacaaattttgaataagcaacgacaagttggagtacatgaagcccagacaaactcaccgatatttgaaaccccccaacgatgagccaaagatccaattctccaatggttctgccattccttcctccctgctagggagaagtgcaggtaatcagcttagcgtctattaataggagaaaacattgatgacctcaactttagagggagaaagacaggaaggtgttccttatttttgggatgtgaatttggagtcatctgagctgagcaaacctatttactcttcaccagtctgcctggaataccaacaaacatgaggatggcagataaa

SEQ ID NO: 51875 - DNA, 518 bp, Oryza sativa
ttgtcgtttgtgtaccctggctggtcctggacagggatttaatgcacattcagcttagaaattctggttcgagaatttctgggcgtgacactgtgccttaatgagttctgttggctttaattagcgaagatgctgtcctgcagagcattcttgaaagaactcacctttgtaagcttgactgttggttgcagtctatggagattttgggtgaatcttctaggaagcttactaaagacctaggagtatgacttatacgctccacccaaggggtagtctacagtcggtctaggaccagataagactctgagtgaaacttgcttgcacaagacttgcaattcaaggcgtagtccattgttcaagttgtgagtaagtgtagcttggagttctaggtggatgttcaaccttaatcggtctccatcgaacagctggtatataaacagtacattggaaaaggcaaatctacgagggattttgagatttggtgggggattgtggaattaatagatgggctaaggccc

SEQ ID NO: 51876 - DNA, 547 bp, Oryza sativa
tcatatccataacaatagcattattgcttatcgatttcacgggcctccttctcttgtatatccacaaaccctacaattctccatataaaatgccaaagaagaaagataaaacaaaacaatgttcacctcagaagctcatacatacatactcactgcatcatgggccccctttggaagatcaaaacaaagcctcttctctccccctctccccttcaccccaataggccaaaattgatcactgcaaagtgggccccacctgtcagcttccatggcatgatcatttcatcttcatccaaaagatgcccaatattgccatggcattcagtcacatcactccccgcccccggtctcctttccctcctccatcacacgagaaaaagcagagccactactccactcgctcgacggctgattgcctgcctgcctcccctcacccctgcttctccttctccctccttctcacttttcttcctctcgggcgcctctcctctccatcattcctcccactgctccgctcccccattccaatggactccaacctcttcct

SEQ ID NO: 51877 - DNA, 739 bp, Oryza sativa
catgttcctttatattgacttcatctaccaagaatctgaatgtcccccattgtctttgggattagggccttagttttccccatcagcggaattgagagtttgaggcccatctaggcgaggtgttattgggccatgccgcctctttctccgccatccagcccagagcccaatattgatcgttgccagtgcctgggccgcctatcggcaattggcccatcagaagcctgcggcccggagcccgcacgagcacacgcagccgcatccggcccagcaaaaacactactctcgtaatattgtgggccgtggctcccaggtcgggaggtgagtgggccgtcgcgcgtgattctccgtcacggcccaatactgggccgaattcacaccattgttcggcccggcctgctcgtatggagagtttttttttataggtgaagtatttgagattgtgattagactctctccgtccttaaaaaaaattacctaaaaggaaatatgatccattcgagtgtaacaaatctgaatagcaaattatctagattcattatattagaatgtattatattcttatttagaaatatgatccattcgagtgtaacaaatctgaatagcaaattatcttgattcgttctattagaatgtattatattcttatttaggttgagttttttttaacagatggatacccttctggacccaactcaggctatggatctctaaggatggtggtggttgcacctcgcca

SEQ ID NO: 51878 - DNA, 1018 bp, Oryza sativa
cttttttggcctttttttttttttttgctttttttccctttttttctgattacgtttcttaatctttagcacacatgttttttaaaaatattttgatttgaaagttttaaatcttgacttaaaattttttcaaatcttaacttaaaaatttttaaatctcgagttgaaaagtttttaaatctgagttgaaagttttcaaatctcgagttgaatgttttcaaatctgggttgaaagttttcaaatatcgagatgaaaatttttcaaatctgagtgaaagttttcaaatatgggttgaaagtatttcaaatttgagatgaaaagttaaaagtttttaaaatttgacttaaaattttaaatttcgagttaaaaggtttcaaatatgggtttaaaattttaaaaattcaacttcagttataaatttcttttcaatttgttattaaaaaaaattgcgaaaaagaaaatcctaactactaccgttattaccttttaaactgtaattatagtcttgtagaactagccaatagttattttgagagttattttttttagcacaaggaaatagccattcaataaaatagctctaaattgtttggatccaagtgttatttttcagagctatttggcctttaatacactttcctattaagtgagaactgagaaagagaaaaatactttttcagtgagccccaccccagatagcaccaattagcaccctttaaagggatagtttttttagtaggttatttctaaatagacttgaaatagctcatctgtttaaaatttttgggctatttgagaatatttaagagagagctaaaaaataacacatggatccaaatagtgcataagactaatagattagtctaactaccgaaacaacctgcgtcagggcgcgcacgcgccatccggaccgttcactaaccccgtaaccgtgtcgcgcgcgcaaccgtgtaactccatgccgcttgcttcgccaccactaaccccgtaacccggtgcgccaccgaccgagacgac

SEQ ID NO: 51879 - DNA, 2148 bp, Oryza sativa
  unsure (1)..(2148): unsure at all n locations
tttcaaaagtttgagtacgagcagtaacataactacttgttaattaggaatagtaatatagtagtagtattagtttctgatgcttctgctgacgctatatatgttcgtactagtcttctgacaccgtgtttagctcaggatggcgtgttactagagttgctggtattagtgttttatctatccaacactgtagtttgtacatgggatgagcatattatgagttaacgatcacatgatattagtatatttattgtctatctttatgaccagagttaggctatactatcatcgaagtcacttccttatgagaaaatccattatattgctctgagtttgttataggtatatgatttgccactgattttctcatgttctacaatatgatatcgacttttacgtaacttctacaatttactatcgccttccggttagccttcattagtaatgtacatttttgtccaaacgacaaaaatctccttgggacaagaacttccaaaatttgaaaaataattcagaaatattatattataaacataagattgtaaacatcaaattttttttgccaaaatttggttaaaaatttcaaaatatcaaattttaagttttttgccaaaatttatatgtttacaatcttatgtttataatatgatatttcaggatttttgtccaaattttgaagttcttgttctagggatattttgatcatttagataaaaatgtacagtactagcgaaggttaaccggatgacgatggtaaatcgtagaaattaagtaaaagtcaatgacatattgtagaacatgacaaaatcagtgggaaatcataaacttgttgtaaactcagtggcatataatggattctctctatctttaaagaaagaaatgtgtctgtatactactccttgcctccttggtatacgtgttttaatacagtgctctaatgggtgtgtttggttccntgcatcgcacctggctcgcatccacgggtgcaggcctgtggtgtttggttgcctgcacggccactctagcctggctccacgcgtgcaaatcgggcttccgagccaggcccgagagaaacggtcgatctgagattcgctcctcatccgggctgagcacgtgcaggcgggggacgcgtgggtgcaagctcggggacgcgcaggtgcaggaggcgagaggggttccagcttctgctcaccttcccatctcatttgtcgctcggtgcctcccgtctccatcgccgcaccgtcgtcgtcatctccatcatcgtgccatattcgacaaagccatcgaagcttcctcaaccagaaccgctagagctcctcccctcaaagccgccgccgccgccaaatccagctccgcttgaagccatcgaagtcgaatccggctcctaccaaagctaccacttgctctccttcatccgaatccagatgtgacgacgagagagggttgtcactgctgacgcccggatcttcctcctagtcgccgctgtcaccgccaccatcgccactgccttcgtctacagctgctgcatcgggccctcttcctctccttctttcgtcagatccagagcccaggagctcgatctagtggcctcaggcttctggttgccggatccggacgcttcctctcccttcttccatcagatccagagcccaggagctcgatctggtggcctaggcttccggatccgaatgcttcctctcccttcttccgtcagatccagagcccaggagctcgatctggtggcctcaggcttctgattgccggatccggacgcactgatggcggcgaatcgtcaggatcccgctactgccggatctacgccctgccaccgcggcgtagttggctgtctcggcgacgaggccacagtcacctgccctctttttccttttatttatttgctgttttttctcaccgcttggatgaattaattgaacataacaaagttgatgcaatactgtagcacccgatatggttcatatactattttattcgtcagtgcaagaaatccaatgacttgattttatatacagggatacactgactaatacaatcctatgcatatttcgcatatgttaaaaatcgatatcatatactgtaaaaagatcagcgttgagatgatagaaaatttcatccattagttatagatgg

SEQ ID NO: 51880 - DNA, 1021 bp, Oryza sativa
ttattgcaagaaagagtagtagtagaatattgccactttaatgaaagttatgatgctacgaaacaaagaattggttgctatgcatctagagaacctggaattagtgccgaggtccacttgttatagatggagaaagaatgtgagaaaattgtgagccaactgcctcgtctatgacatgtgggtccaccctgtattggatacaatttggatgccaaattggttaagaacaaagccaaaccagtgaaaggagatttagatggttgagggacgaggtttaccaggttttgaagttgaggaaaaattaaactgagtaaagagttgagatactagaaatagacgttttctagtttaattgaaaaaaacctggacactgcattgatctatactatactgttcacatcctcacagctgactggttctgaaattatttgttatggcttcgattgtcttgtgcttccttaataaagatctgatgttgggtggatgttgtcctttgtgccatacccaaaatgaagtcctagtgagattgagactgtccattgaggcaatttataaactattttgcttaggtaccgtctaaactctaaaaagcataccatttggtactctgtttaatcattttctcttcttactcaataaaagcgataagacttgttctagtgatccccttttgaatatttctcatgcttcaatcccttcaatgctggcttcagcggctaactagctatgtagtaatatgtacttgctacattgactatatgtcagctaaaaacgtacttacaatttaaatcacaagcttatatagttaatattgactataccatgctattgctagttaacttttcacagaatatgtcatgtacggtttagtgcaatattgttacaagtaacaatatagcaataagtgcagtaagcaagctatgataccttgagtccatgataaaagggagcgatgatagtttactatgtcttttgttcaccagtcaccatgggtccatggcttgtattgtagactaatggc

SEQ ID NO: 51881 - DNA, 1929 bp, Oryza sativa
cgatggcgacaaagcaaggtggcctcgagacaactcgagatcgatcagcgtgtgctgactactggcctgatcatatcgttctcaggccgatcgaacaccctgccgtcacgacaccggcacctgcagccaggtacccacttaataaaaaattattatataatcacattaacatccactctgatcgatccataagtgtttggtcgtcattgatcgttggtcaggacgaactactatataccagctacttgcacttgattttcctggcccaaggtgtctctgggtatataaatatatgtagtagttgcatagaacaaatctgaaatcagaagcccgcatatcttttttttttttgtgaaggtgttagtactcacatgttcagacatatctgcaggatgctctctttgacttggtttgtatttttgttcagtactccaattcaaagaaccttatggagtaggagtagtaatagtagtagtacggattgaatcgtatcatacaaaatatatgatcatgagggtgacctataatgtagaacggacgataataaaggtgttcccataattgatagattatggataacacaaaattactgatatggatacattataaagctacagtaatagatagcttagagaaagctatctaataagctatactgatgcagtacaagtttatgagaaaattgtgtttttaaaagcatatagcaaggataatccacaactccagctgttaatttagatttgtgggcgaaatctgcaagtggaaatcaggacaacgttacatgccataaacttccatatgttgctgcgtaaacaacgcctgatcgagtagttgcaactgcattaacagtaaagcagcatgcatgcacttcgatcgaaccatgacatgtactgctgatcaagcaggagactgacgctgacgctgatcacactgacagtctgacactgatacacattattgtttcagtttagctggagtatagtaggagtatggtccatcaggcacacatgttctctccctgacatgaatgtacggagtaggattagcaactcgcgagcgaccaaaacagtctggccagctaccaccatcgctctttgcacggctgccacagacgacgagctggtatcgacgacacagcaaaaacatcacacccatccctaagttagatactccttcatgctatagaaaatcaatctagtaccgatgtaatatatcctaatactactaatactaagaatctgaacatatctctgtatagcctatactactagctagctgtatacttcttatttcgttttctaatagtgacactttcaactttgcagtacacgctttactatctatattatttaaaaattatgtacaaaaatacatactccctctatttcaaaatataagcattttagctatgaatctggataattggttggctagattcatagctaaaaatgtttatattttgggacggatgtagtaagatataattaaatcatgattaaacattattttaaaaaactcatagcaaaatagatgataattctataagttttataaataaaaggaatgatcaaatattggttaaaagttaacggcatcatctattaagaaaataatgttattattgattgtacagtatacaaatatgcatacaggaaacagcatgtacaagttcattagctaaagtttcacgtcattccctaactcagtctaaagtacaacacaatattaaatatatgtggtgatatagagctgctaggtagtatcatcattaatgtccaatcctgcctaaagtacagacaatggtattttcttttgttcatattttacataagaacacagtctctggaatgcatttttaattattttttaatataatatatataataaataaatacatttaatttttatcatagtactttgtaagacaaa

SEQ ID NO: 51882 - DNA, 588 bp, Oryza sativa
tataataaattagctataggttaactttattttttccattctctttctttctcaccctatgaatttaatgcatatttcttgtggttgggtgaagctggctcttgcataagagccaacactacccactttttttctctcttccacataagcatatagcttgcttatagcctattattaatcttgctctaactcatttaatcctatagctactagatcctctttcagaaaaaaaaaggtttgaagaatgcttatttaatgatgcaaataattgagcatcggcgtgaaaaagtaaatttcagtgttgtatctagtaagtacgctttaaactgcacaagatatctcttggcgcaagtaatcagcagttgcagagtcgcattttttgacttgtttctggaaaacaaggtcatggtctggagtttcttgactactgcgtcaccagtaactggaagtagagagtagtaacaggtgtgtgcgcgtcaaagcgtcgtggttctcgtaattcaatggtaatctggttgctcagataacctgtaagtttccaccaattttcagtctattgtatggcagatcattgtacatgcttttttt

SEQ ID NO: 51883 - DNA, 6038 bp, Oryza sativa
tcaggttctcggacaggcggttggtgcagaaggacttcggcgcggcacgaccggtggaggggctcttccgatactgccaccgccactcggtctcggcggccggcggcgagaggcgggcgttccggctggtgcggttcgccggcgcggcgtcggaggagattcgccggggcgacgccacgttccagcagctgggcctccactgctggaccctgcacctcctcttcgggttcggcccacgggcccatggtgtcggacactgactgagcaactcccgagtccgaccgagacgacgatttcaccctattgtggattatcaagtagttgttaggagtagtattattattgtctttcgtccacggcgtttctgctgtattcgccaattctttggacatggttagatcgtgcgcgctagcggcatatcgctaaccaacgacgtccttctcttccaaaaaaacagttactagtacactcaacagtacacgcctttttttttcttcctagagagttttctcctaaattacttatccaatctataatccgattacaccattatgatcgttgcaattaaatctttacaacaagatcttatacgattatattctgataaaaaatatctatgttgtaaatacttttattatatatgtaagttacttttgttctatacataaattacttttagatttaagctttttaataacttatatcttttaaatcacgtattattttcatgatctatttacatcattgtactctacataaaatatgagacaaaacaagatccatgttaaatatattcaaatatttcattaatttaaaagtaatttatttaaattgtagtagtaacttagctatgcaatagatgtaacttagctatgcaatagaagtaagttagcacaaaataaaagtaagttgttacaacattagaagtaaattcgagagaaaaatattttgtatctaaaaattaaatttaaagtccataaattatacaattgactaaaaactataataaacataattgacttaaagcattatgaatatataaaaagtaatttagtcaaatctaaaagtaatttatatatatgataaaagtaacttaagtatataataaaagtaatttacaagtataaatattttttatcgtagtataatcatgtaagatctagttttgaagatttaattgtaacgaacacaatagtgtaatcggattatagatcggataagtaatttgagagaaaactttgtaagaaggggaaaaatacatgcatgtgtaatagaaaaaaaggcatgcatgtgcgctggcttctccacggcttttatggttggcgtcgcgcgataagacaatatcgagaggcctcgccgattagtttttgcgcaattcttttgtttctctctcgttgtgagagcaaatttcgaattcaatttgtgtcagattcttacttcgatttgaatttgtgttaaccgcttagaaggttcttaagagaacaaggcatcaagggaagccttgatgaacatgcaccaagtggacttgacaccatgtgccaaattgataggactaggggttatttatttggttgccacactttaccacaccacactttagtcatgccatagttttttaggcatctgtttggttcgctgtcgcaattgtgttatgccacactttcttaactttgggacccacatgtcatgctctcaaatttagagttaagcatgtcacacttgtggcaaactatttataagccacacttatgccaccatatcacaactaacctaaacttagttatggtaaggttaggcatcaatcaaacatcccctaatatttataattatttagcatatactttataagttcaattttgtttgaatctgttacatgttgcaatgcagccattggcctatatttgcataacatcaaatgcttagattcagatgtaatactaccaaacgaggacagcaattaatccaacaaaagttggattaaattttggatactcgtggcatgctttttaaactgctcaacggtgcgtttcgtgcgaaaactttctatataaaagttgttctaaaatatcatattaatatatttttcaagtttgtaataattaaaactcaattaatcacacgttattacaaccttattttacgtgaaacacttaatttttatcttcatctcatattcaggacattcaaacaccaccttagtttggtgcgagggggcaatgggcatggtctatgaggacaggcatcaatactatatactcctttcataaaaaaaactaaattctaaagatgaatctaaacacatatgtgtctaaatttattcttataataaatctttttaggacagagggaatagagatgtagattttcatatgcaggaggaggacggggcgggcattccggttggtgcagttcaccgccgcggcatcggaggagatttgccgaggggacgcgatgttcgaggagctggaccttgcatctcctctttgaactcggcccacgggccaacaatgttggacagtgaaatcatattttcttaaaataagttcatatgaggtccctgttcaacaaaaagtgattttcatcctacaaccgaaaaaccagatacaacggattccttaactgtcaaaactagtgcaaaataagaccaaaggcggtttggacggcggtttcagctaacgtgatgcctgcgtggctaatttggcttggtcttcatctgacgtgacattgacgtggcgcttacgtcgttgtttgatttgggaaataagaaaaaccgtagatctatgtgtcagttacgaaaaaataattaagaaatgatgggcatacgtggcccccaaatgtcattctcatcccatcctttcttcctcctctctccccatctcccttctcttcatctctcccctctctcttctcctttctccaggcgagccccgccggcggcaacgacccaacggtggcccaggacgtggtcaccctgcacgcactcgacaaacagttctacaagaacgtgctccacgccgagtgctgttcacgtcggacgccgcgctactgtcgttcttggcgacggcgaggctggtgcacgccaacgtgcggcacccggtgtcgtgggcaaagaagttcgcaaggacgatggtgaagaatggcgaggattgggctcatggccgcatatatcacaatgttactactccctccgtttcaggttataatacgttttgactttggttaaagttaaactactctaaatttgactaactttatagaaaacaatagtaatatttacaacaccggcatagtttcattaaatctataattgaataatttttcataatatattaatcttgggttaaaaatatttctaactttttctacaaaattagtcaaacttagagtagtttgactttaactaaagttaaaacgtcttataacctgaaacgaaggagtatatgtcaaactcttgtaacatttttgcgagtgaacaacaaatgaatagcaatacaaatctgatataaatcaattcatgcgctgatgtataaattcagttcataatcagttcatttttgcgtgcaccgccaccttcgtctccagcttagccacgtgggcagcgtgtctgctgaaaccgccgtctaaactgttttcagacttattttgtaccgattttaacagttgagggacccattattactggtttttgggttgaagaatgaaaatcggattcactaaccgttaagggacctcagatgaacttattcctattttcttcgataacatgatagacacataaatagccactgcacatgtaacaccaccctcgcatctatacggtgaagttagttaagctgtttgtatattcgatttctttcgtctgcaatttgcaacggctttgccatgtgcgttatggtcacgagatcgacgttgtccacttgtggaggcaatcaggcaaaggtagcttaagcttggtgggttaactgtgaaatggaagagtactatagctagtactagcaataatgtttagatgatttttcttttttgctgattagaatttggtactgtttttgtctacgcaatttagggttgatctccacaaattttcgctccgatctcgtgcgccgcgtgcatcacattattctcccgtgtatacattttatatacctttatgaccaagtaaccataccctatatctttatggacgaaatagcattccaaaatgcagaaatttcagtgatcaattcaatacttttacaaactacgaaggctatgtttggatccaaagtttagatctaaacttcagtatttttccatcatatcaacttatcatacacacgtaacttttcagtcacatcatctctaattttaaccaaaatctaaactttggatccaactaaacacagccaaatttgttttctgcgttccaaataggtaaaatgaaggcaagcaaatgcaagcgtccacatgtcttcaagcccaattaatgccacttccgcatagtaaaaaggtctgcccaaacgaccaacgcctcctagctttctttcctcctcaatcctggtttccttgctcagagctttaggcctggtttagttcccaatattttcttcaaacttttaactttttcatcacatcaaaatttttctacacacataaacttccaacttttccatcgcatcgttctaatttcaaccaaacttttaattttgacgtgaactaaacacaccctcagtaatgttcagacttaaaagagacaaaatgcttatgtcggtttggacttcggagacattttaattggagaatgaaccacttgttgactttaaaagtgaaaaaaaatatttagagaataaacaaaacacaatacactcatggatgattggatgcttaacatgtagtgttaataagaaattaatctaccacttgcggatctacgtacaacgtcgttgcctggaggaacgaagagcggctgcaatttaccgtgctgacagcactgtcaaacaaaacgaaattacgctacccaagtcatgtgaatgtgttctagcttgcgtgttaatttaaacgggtataattaaaaagcagcgcactgatacatacatgttgcccatacacaagcagatcagtcgagtgtgcaggaaattcccagtaaatttccatagcacttattttaataatatatagtcaaccaatcaatgaacactgtgaatgcactgcagttattgtgtgctactacaaaaactgttgccgacattgttcagcttgatggtgacgttccttttttttattttgtttgaaggtgaaaaggatctgtatacgtggtggtagagacatttactgataggaaaatgcatatattagcagtttagcgctaagtcctcttaattaatttgtgttacacatcactgacttgatgaagtgtgtgtgtctggctggaggtctcccgtacttcactaggagttcaaacagtgcagaaaattaaagagataataaaacaagaattctttgcagttgaattcacttgagacgtatatgtatcattcttttccaagggaaaggcgctgattattgaatatcgatgacagtttaagcaaacagttatcccaaacagaaaagttacagatatctgaacaaaagaaaaattggttgctgctaaacattcgtaaattcacctggattttctggactgtacgtgtgccggccagataatgtgaaacaggatcaaacagcttgaatttttcactcacaaatagaatatttagacgaaattcaatgaagacgtacgtcagtacattaggcttctctccaagtagtttcccccctccttcccgggaaataataaccagtccaattacacttattcaataacagtacgaagtcaaggccaaggttctgaacaattccaagagacattttgtccttccattttaagctttggtccttctccaaaaccctacaaataccaccagatcgagctgccatgccaggcatctccacaggttcattcattcatccgccacattaatttctatcgtcacttcttgttttgagttatttctttcttc

SEQ ID NO: 51884 - DNA, 1937 bp, Oryza sativa
ataaaactatagatttaactcggtgtatcataaaactatacatttaacataaaatttatcacaaaactacacatttaagatgtagtgacacaaaattacatgtttagtaactaaattatcacgaaaatgcatgtttagaaccaatttaatcacaaagtaataatgtttataactcatcataacaatggtgctagggatttaaactccaaaagttgtagttttgtgataagttcaatattaaatatgcatttttgtgatacttaacctaaaatctgcagttttgtgataaatttagtgctaaatatgtagttttgtgatacaacttcttaaatctgtagttttgtgataatttggtcaaaatacctgtagttttgtaaaatttactctaaataaaactatatacattgctaagactgaaattaaagtgctatgcaatgtgtaattttaattcattttagctgcaatattgtacataattttaaaaattttatgacttataagtttatttcatgtaattttttttagaattacacagtacaacacagacactcaaaacgcacgcacactcttgtatgtcggaatattttggtagtaagcaatagcaaagtgaatgagtgatatgaccattggattaatatattatcatccaatgtatgggaaatttaaatatactgcattatatttaaatgcaatatatgtaattaatttgtttggaagaaaacaatactggttgaacagatatgaacagttaatagaataatcgaccgattgtctcatagaaaaatgaatggtacatgagttaaaccaaagaattcaggcctacaatgaataaattcgtctaaggaaccctacgctacattagatgaattcatctcaacaaacagctatggttgtctacgttagagcaagggcagggtcctcttcttccactggaagagtgtattcatccctcgagaaaatacccttgtttcttttatgccatctaaatagttattaaaaattaaaaattaacaagatagattaatataaaatatatcaatccacagacatgcagatttaaattcaacttctacaagttataagaaataattatgaaattttaatttgttttttataacttgtagaggttaaatttgatcttacatatttgtagcatgatatatcccatactccctccgtttcaagttttaagactttgactaaaccgtttcaagtttcactaaatctatagacaaatatagttatagctataatactaaattagtttcatcaaatcaataattgaatatattttcataaaaaatttgtcttgggttaaaaattttactactttttttctacaaacttgatcaaacataaagcagcttgattttgaccaaagtcaaaacatcctataacctgaaacggaaggagtattaatctatctcatcaatttttaattttttattactattcatatgacatgtaagaaacgaaggatgtcacctagacgaagaaaatccatctctgcttccactgccgcccatcaacatctgtgtggcgagccgacaccgccatgtcgccatgatcctctgtggcgagccgcgcgcatcgacgagcgaggctatggcgagaagaccacgtatacgatgcagcggtcgagccgcaggtcctgcagcgacgcgtctccgcgcggcgggatctcctccgacgcgccgccggcgagccgcaccagccggaacggccgccccgccatgccgcacgcggcgaccgccgcgccgcagtagcggaacagcgccgccacgggccgcgccgcgtcgaacaccctgtcgaacacgcgcccgtccgggaggcggacccgcacggcgcacgccgcctcgccccgcgccgccggcccgtcgtcgcacacggtgacgtcgacgagccgggcgacgagctcctccatatcgtcatcggcg

SEQ ID NO: 51885 - DNA, 1399 bp, Oryza sativa
ttagaattctaatatttaaacaataatatctttcacatcgcatattattttttagaaccgttttattgtctcgttgtaacgtcgttttacagcgttgtgagaacggttctaaaagttactacacgatgatcgacacaaaaatgcttttataacgttgttactgcggaaattagtggtgttactgcacattgatcgtcgcgttactacgccgttccagcgacacgagaacttaaaaaaagtaaatcccaatctttagagagcaatatcgcccatgagagaggggggtgtagaatagttattctaggaagtaggggaggggtatatatatatatatatatatatatatatagtaaatttgtttggtgctccatggtgcccgggcaccattgttgaaattgagtatatacccaattcaaatgagtatgaaactttttcaattacttaggtattaacattaactactttactaactagttcaaagcaagtttgaactgaatttgaacttgtttttgttagattttgattataggtatatagcatccatatatataattagttagatatgtaatcatggattgtgaaataaagttaaatttgagttgttttgttgataagtataggtatgaatcgaattattataactaggtatatactcacaatttgaaaattttgaaaaatttgagtgattttgtgcattagataccatggtgcccgggcaccatggtgccccatatgagtgtcctatatatatatatatatatatatatatatatatatatatatatatatatatatatatatatatatataacacacaccgtaacttttaacacttaagctataattatttttttagtacacagtatacaagagaattaagataaataaaaaataattgattggctatttaggaaaagagaaagaagagatataaacatataagagagataaaaacacatagggaatcaagtaaaaatatggtatatttttagcaaaactgatttttctttttttttctttttcctttcggagaaagagaggcacactctgccacttccatcaatagaaatggaagtttaacagacataaaacgttttccaaaatatcggaatatttttaagcttttaggttaaactggttagtgcatgcagataaattattatttttacatataaccctctaagcttttatagttttattgggagtggttggaagagctagctggtgcagtacaatctatagccgcagccaataaaagcatgtaagccttatatgtaagtccataattatttattgaaattattttatttaaatatgaaaaaatgttaattaatttcccatggtaaaaggttaatcggtttgggggtttggaggaatttcaatttgtacaaataggaaa

SEQ ID NO: 51886 - DNA, 2090 bp, Oryza sativa
taatttatgagtaaaatttcatacttatgtccgtagcgatccaaaagtaaatgctataacataaactacgatgataaaccgcaaaactgcctcgaaaatcaagttttaaagtttaaaaattataaattttggcttatacttttcccccatcccctttggtgcggaagcccgtgatgccccgtgacgtggtggtcgccgatatgtggggtccacatgtcagggactaggcccccctcaatcccccctctcgtcggcgtgatgacggcgtcggctcctcgcgagttctttctcccgccctccgccgcccgctgcccgcgcgggtcgccgatctccatatcgcgagcaaagcaaagcaggaaatgagatatactagtaaaaggtgaagtactcgagtatcttccccttccttctccttggcgtaagagagagagagatctcccgtctcgtcgtctcctccgcttccctcgcgccgagacgagtcgtccatctggcgagcagagcaagggagggggagggggaggggatcctggtgagcatccacatcctctttctggttcatctctcagctcccacccggaggagtacttttggtctggaatttgcttgggctcgttaaccctaagccttctcttctagttctagatctggaagaagcgagccttaaccttaatacaagtagtaacagtttgtttgttcccgcaaaagtttgggggttcaactgaacccccatgtcccaaggtgaatcgacatggagatttgtatattggtggccatttaggaaaatgggtgcaattttcccaccctggacaattagcttttttttctaaatgaacctcaaaagtatgcaaattaatggtgtcgattgaaatgaaggctaatccgagatcaatgtaaataagctatagtaaaataattgctcaaagcgcgatgaatccttttcattcatgcgaaattcagaggggacccacccatagtttttccccagtaaaagcagaattaatgaagccgaaggttctggaggtttatacgcaagatgaagttaagggttttatggcttctcaataggcgcctgttccagaactgagtacacaagagcatgaatgggtgggtaattcattctgactgcttcacttctgttccttccattattagtgggaattgctgctatgcttcttttatgtgtatgatcgtgtagatatgcactatattggtgttgcacatgttacaggttaaaagtgtcttcgaagtgctccaaggctttgacaccgtcttgctctactgggaccaagactgcgcccgggatactgggagaaagcacggatctatgtttcgcaccttgtcacagacgagcctcagagctgtgctcaagccttttctgtttgctgcaacatgcttgaagcaggtggagctctttgttgggagggtaagatcgtgcggtcatggaactccgacgctgagtgcatttgctagttcggtcgattcttggctaatggtgaggttgcaattcagactgcatagatttttcggggatgatgtttgttttgtccgaaattacattgttgttatgttaatatcagaggctccgcaaagcagctctgaaggaggaagagcagttgtttctttcagttgaaaggactataactctgctgggattgactgattctatgcaaggtcatggtctattctactataacattacttttcttcatcagagtgaccattactttagtcaaggacctcttactgttgtacgaaatggataactaggttagcttttagtagtgatgttgtatgttactataggtgattctagagatatcagcaactctatgtaatgtgtgatggcaaaaaaagttgcatagagatatgagattatagagacatgatagtatagtctttttttttcctttttaccattttaggtagttttctaaaagccggagaggactgtacaactgacaacctgtgttttcagtttcatgcttctttatcacttgacagactgtggttttcactcaccccataatataaaatcttatgcagtttatgttctggagcagaacatttgtatcaagttgtgcaaggagctg

SEQ ID NO: 51887 - DNA, 805 bp, Oryza sativa
catagtctcatcgtattcttcttcttcttctctaaaaaaaattgtactccctccacatccacacctccacatccacaaaagttacacctatttcacatttaagttttttcaaataagttgttcttatttgtagtctttgtacattcaaaacttaaataaagagataaattaattgtttgattagacccaagaagtcaaatccttaggatctgttcttttctccaacaaaacttagatgaaaataaagattttcgtggcacgcttttcaaactgttaaacggtgtgtttcgtgcgaaaactttctatatgaaagttgcttaaaatgtcagattaatctattttccaaatttgtaataattaaaactcaatcaatcatacgttaataccacctcgttttgcgtaaaaaacttaaacttcatcttcatcttcaacttcacgagaaaagaacaccacctaaatactcattggttgcatgcttgcattcactccttgattttataacatccaagacgatttaatttttcattggtctcgatgataaaagtaataggtgtaacttttatggaagaagggagtagttaaaaaatggcatgtagcctagtgaatttcagattggttgtttgcgggattaagttcctaatttaaatggccgtatatatccggttggatatagaggccgggtaataaatacccttcttaaaaaatttttttgtagttatcggttatattgagatgtaaaaatctctatgcatgcttgtccgggatatcacttaattaattagcaacatacatgtgtgacctccgt

SEQ ID NO: 51888 - DNA, 532 bp, Oryza sativa
atggagcatattttttatgaatatattggacgcactgtttaactaaaaattgcatttctctttctcatacatgtgtgcactatgatcagtggattgtccatttctgttgcgtacgcagctgttttatccatgttggtgtgggtctgaccactacacagcggtgaatggggtcggtcctccggcggtaggatttctttgtcgtgcaggtggatttggggtagcaaaagtgcaaaaccccacggaccagctgccatctttacacatgaccgaaacagtacatggataggttaactggaggacaccgccggttttcgcgaggagctttgtccactagaaaatccacgttccaaggaacaaaaataaacggaacgccatgggagcatgtgggtataatatgagaccccatgaatgcagtgcagtcagaagactcggaacaagcataacgaggtgaaaccatcgaatccagagaagacggcagtggcaatcttgggatacctctttaagttcaatcctgaattttaattgactgcgc

SEQ ID NO: 51889 - DNA, 581 bp, Oryza sativa
catgattaggaggctctctgaattttttcctcatccggagatgcagaaagtggtgtcctcctgtcaactgcgttggtgcatgtcaagtccagggaggagtgacggcaaggatggcttcacggtggtgacgacgataatgaggcaaagcacagattctggggagacttggcacagcaagccaaagtttgcgcatgtttcaaacggaatgttgagaagcatcgatttaatagtaatttagttactaagagacaatatgttgttgaactatcagtgtaatagtaacttggttactatgagaaactttgtggcaagataatatgttatgtgagaaccatcggtgtaagagtaatttatttactaagagaaatctcgtggcgataccaataagttaattctaagtaatttatttactaagagaaggtatatgaaccaattaggaatactactatcgtaagtaatttatttactaagtgaagagttgagaacgacctgagactctaagagtgattcatttactgagaggaggaaccaaattagactctgagagtgattcatttactgagaggaggaaccaaattgag

SEQ ID NO: 51890 - DNA, 2656 bp, Oryza sativa
tgtttagtagggttctagtgatacgtgacagattaaaatgttatctactattcgatcacagaaccgagaattgataagtctgggatgagatctgtgaaattgatattggcaggttggttgaagatggggattaatctgcaaccatttgtgcacaaactcatttggaatgtcttagttttttggtgtgtttttgcttcaaaaataggattatgttgatgctggcttgatcaaattgaactgggttggttgcagggttggggttaatatgcaaccacttgtgcctgtactgatttggaatatcttatatttgttctatttttgcttcaataatagtttcaataaccagattattcttgctgtgtatttcgccatttgtgactccattctgactcattaccatgaacttgcatggttggtgcgatctagtacaagaacttgtaaagcacttgtttcttgtagaaatgtttttgtacaagtgaatttaggccataagggcacaccatagatatgtttattgaattgacgctgattttgaaaccacgtagtcatgcacatctgagttgaataatgatttacatttacctatgaaaaaatataagtgtacaagttggcacttagacctttgatgtatcatgatatcgggagtatgatttctgtgaaaaatttgaaggctatgtagatgtgccacacgttttcaagtcacaaaattagaaatcattaatattcattgtgtctgggtctattagaaagtccgaagcttcatttgcctgtttatttttggtatgttaaaatatgtgttgcctagtgtcccaatcgtctaatcaacatccaacatagcaatgttatatatttggtgtcattttagcatcagttaacatgcgctacacagtttgcaagtgtattgcacctgcttcacaattatgagttattgtagtaccagcataatttgttctcactataagcgtatttgttctggcaaggtgccaattgtacaatgaataccacttgcataaattgaattgttctcaatgttgtacaacgaatgaattctatactaattgtattgattaattgagttttcattagaccctcgtgatgaatatcaatgatttctatacactggtattgacttgtagtatacaatgattgaatcgttctcaacattgtacaatttttttaaaacaaatgcattgtacaattaattctatactgaaatgacagtgtcgacctgcattattttgactagttttaatcgatgttcttgttattcctttagctctgtctaacggtcaaaatgttcatttttcagctcttcttgtatgggagctttttgactggagatgagaccgttgatcttaagaatggcctcacatgttgcatctacaatgtgatttcaatgctcaccatggagatggccagagtctcggccgtgaacacaaagacaacaagatatttgttggtatttcttatgatcacagataaatctgcaagcgtacagaatataccgatgtagcatttcacccgggagtattctcaggtatcgattttcacagggaatgtgtgtgctaactccggtttaggttcatccaagggcacgaagctatggataaggaaaggatagagaggtttcaccgataagaaatagtgtctatagaaatctcaactttaatcctaatgcggtacttcgagcactggccagctcgctgctcccagatatcattttaccacgcacccggacagggaggatttcactcatattgagggctgtcacccaccttctacacttcaccttcacaccttaccgttgggattgcggagccaaccacccgaaaaatccaactaccctagacccccgcgtcttaagcaatttaatagctacttctagtgttttgtactccacttaaagcaatcactatattataatggactatagtgaacgatgatcccacacgctaattaggaactaaccaagagataattctcaccaagcaaaactaaattacttaaaagatatttctattataatcagagtaattaacaaagcacaaagaaataggaaggggattaccgacaactccagaactcctccgacttcttctcctctactctctccctaatctagtatataataaagtacaatagagcatcttataattcagctcatgcttcaagtgtctgtgaatgagggtgaggagaggggtatttatagtgtggaggtgacttgagagagtggagatgctaaggaatattctccatagaatccaaatagcatcttccttctccctttgccatgtgtcttcctgatgacggtttccactggtattaacgctcataaccgtcataagatgaggagtacaaccatcatgccgaagctggattggattgggccagttgctcgaaccctggctagcccatccagctagccctttctctggtgttctgacatgtgggtcccactatatgttccaatgaaaattggccaagataaatgggctcaacactccataggcttggctatggaagttatattctcatccttcatgtatatttcatctcaactttggtgggttgcattctgcatacaaatatacatcagcactcgtagaaatggttagaaataaatcctaccactatgttggatgttttacttttatgg

SEQ ID NO: 51891 - DNA, 937 bp, Oryza sativa
cctgcacccacgttggatccgcccctgctgaccagtaaatgctaaatgcatgttgactctacatagcgtaattgaggtgaagaaggccttttttttttaccaggaaatttcctaccttgtaataaagatcatagcgtcaattgagcgtccatcttcttgtgtcgggtcacgtgacacataggttcagatagcactgttttttacatctaaaaaaacaggaaacaaagaaaaatatatatgaagtgtatttcagtatttgcaacagttctcatatctgttcaattcacagattcgccctctttcacttttcactatgctagtttatgctaaacatgacagaccatcatatatatatatgaaattgtttaagaaaagcatacataaagaactttatgtggcattattcggtgcataaaagagtaagatggaaaatatttgcatagctacaaccaatgcataatatggacaagaagatccgctggacgccttcatgtagctatgtgaatatcattgaatcagtcatcttgcagatagaaaatggtaggcacaagctataggtgcggactgcagaaggtttgcaatatgagcagtgaacacaaaataaggcatccctgtaaaagcacaaaattaagaactggacaccagaggaagaggagattgacactccgtggtgctaagataagatttaccagtagaagttggcaatcactatcgacttgttcatgtgtgggtgaaagaacaacattacgataaataggtcatgttgctaccgatgtgaaagaaaattcattagttcaccacttaattggaagtggtggttgttagatatgtgtatatcaatgtagccttagacttatttactatcggctcatgaggcccatacaccgctgtatatactattgctatcctggaatacaccgtactgattcagcacaag

SEQ ID NO: 51892 - DNA, 733 bp, Oryza sativa
tccactcatggatagaaacaaaaaaaatacccaaaatactctttgatcactgattcaccgccatccaacacacgctagaaaactgaacaaggttaaacgcactctccactcagcaacatcttccgctgcctccaacccaacgcaaaatcaaatcaaatcaaaacttagtaaacccacagatcaattctactaacacactggcctgaatccgcccccaattcgccacacggagataactccaacctacactacgcacaaccaaacccagattctactcaaaccacaccacagtaacaaatcgatcaggcaagacaagaacatgtcctactcaaactattccagaccatcaaatgaacaatagaagcaagcgagacaagattttttctagatactgaaaagcatgcggaaaactggtcatacttaccatcgcactgttcttgcaagagaccttctagccaacgctgaagttcttgccaacaagatctacaaaagcactagaaaatagcagcagaaatcaacgagtcccttcccaaaatgataaaccttgagtttcactcgacactcaaggctgttgttggcctgatctttcgatgagaggataagtcgataggatggagtggcgttggcggtccgactacatctatcaagggatgttgcatcttagcaatcattacaccaaatctctatggaatgcacgatcagcccaaccacaagggtaattgttcctgcaagc

SEQ ID NO: 51893 - DNA, 501 bp, Oryza sativa
ccataattacataccctaactaattatatgtatggaagctatatacctaaaatcaaaatctaacaaaaacaagttcaaattcagttcaaacttgctttaaactagttagtaaagtagttaatgttaatacctaagtaattgaaaaagtttcatactcatttgaattgggtatatactcaatttcaacaatggtgcccgggcaccatggagcaccaaacaaatttactatatatatatatatatatataattgtattttgtaatacaattataccaatcaatctatacagtattataatccggactcaccaatatctaactgtaaaaatctttttctttttctccgattaacgtgagaatttctaacctgatactccttttaagactatattaataatataatataataataggtgggatgcggattactccttcgcttgcccaaatatttatgggctttgtttgttctaggacacacatcttgatgttgtgtaaccaaagt

SEQ ID NO: 51894 - DNA, 4861 bp, Oryza sativa
gcccgtctagccaattctctaacagcagcaagaaggcgatcttcctcacccatgtctactctatcaacaatttgctcctgtaaaaaaagagggttatgacactaaacatacattatcctatgctagggaacagagaggtggacacttaccaggtaggaaaatatgaagctcctgtagaaactctccccatctctatacactggcctcaatgctgaataatgactatgaagaggcaccaagcgcataatgataactgactccctttcccttttcgatagcctcagaacattatggatgtccccaaaataatgatacacagcttcttccatgggaattttctgcacctcacaaacaaataagggaatttaaaaaatatcaatgatctgaaccagcgagcaacatgacaaaaaaatgaaatgtaatttatgttctaagcaccagtttctggattttacattctctgataaatgtttgaaaaaattaattaaaataatcccttcatttttattgtttgactgttgttcagtcatagaagatgggctagatacacaagatttcctaaattcagcaacagtagtagaacgttcaagtagccatcacaatcaaatcggcaaatcctttcaattacatgcaaaacataactgcaatcaagagttaacttatgatttagagtgcatacaagaaaatatactctgtcgaatggctatctgtacaagtgtgaatgtacacagtatcatgtgatctatcatcctgacattacataattcatacacttgcgtttcagcattatcaaatgttgaaaggaatcaaaccttgtgatccacatgaggtggcgagtttgacgtgcttgcctcatccagttgctttccttgtctatctgaaagctatttacaagataacaggttaagatcatatgttctaccggacatgggcagcatctcagaaaattgatatcaagatcaaacatttcagactaggttgaatagggaatacatgttattctgaaaaaaaataggaatatatggaacttttaaacaacagatgaacaacgatgctacgacctatgagtcttctgggacaattccaagcagcaactgagccaaaggctggatctttagaccaaacactagagtatgctcagttagtttgcatataaaaggcttctataatttagagaaaccatgaccagtgatccaattctcaaatacacatccagacaaaaccttccttacaacactgtccaataaaactgaaagctcatacttctggtttcacgatttctcaccaaaatataacagcagtcataacgtgcctcaatatttcatattttcacactaaggaacttgtgaataaacaaaatatcatgtgaactaggattctcattatgacctttcatgatttatacggcatgttcaacactatcaagggttaaatggagtcaaatcttggtgatcagcaagaagtgataattgtgggtacatttgcttttcggaatttcatttcaacaatgtattcgccttccttttataatccaaaagcaattcacaagaaaacatgttaaagttcatgcgtattgtcagatttagcaccaatttcaggtaagtaatatcagaatcgaacatttcacactaggaaaccagggaacatgggatgtaaggaatattttaaacaacataaaagcatgatcacaaaactagtgttccgcaatttgttgccaattatccttagagccttcatagccaatttcagttaccaagcagccgaaggatgaataatttagaccaaacagtagagaaactttcccaagaaccgttccacatctcaacacacaagctgagacaagaaccgtattctaagcaacaggattgctcctacgcaagatgagccctaatatataccaagttcgtcacgcgtcattaccaccttattttacgtgaaaaacttacttctgatcttatcgcatatgccagacattaatgacccgcctgcctctgctgacctttttcttgaagccttcagaaaccgcgagaaagctcctcctgatgaacttctttagctgggaatcgaccttgtccttcttggcggcctaatccagcgaaaccaagaaatgctcaagaacaaacccccacaccccaaaaatactcccaagaaaccaggcacaaacgccatcaaacgcaagatagggaaccatcacctcttgcgaaccttcgacgacctttccctttcccttctggtcgccctccgtggcggcggagcccgatccgccggtgccgcggcctccgcctccgcctccgccctgctccgggctggcctcggctgcggcggtgatctcgtcgtcatcggcggagctggaggtggactcgtggcgctcgtcgtggtgtcctggtggggcgggcgaggaggccatcgtggcgtggctttgcggggaaaagcggtggtaggggggctgattcgctaatctcgcagaggcgagggggcggaggagaaatgtgtgaagggtgtggttgtgaattccagaaaagtcaggaggctatttataaaggtggcagtagtaggtgataatatagctggcactgagaggtgacgtggccttttttttcccccattttgcctaagatgaatatgaaagttactactttttttaaaaaaaaatcgttcacctcttttcaaagtataatttcttttgaattaaatgaaaaaaaatcaaatcttcaagattgactcaatagcttacatatggctccaccaacaacctttagttttgcacatccccttttccctaatcaagaaatccatctaacatcctgatctttagaaccgaacttcaaaccccgaaactttgtaataatgttcagattacgtcctacaaggtttggggtatttgaaaggttttgaataactgatatagcatgttagcatatcgtcaattattgataatcaattattctatagtgatgacaaactagtattatattaacatccgtttgtaagtaagagaaaaaccaggtgtcgaaacgaaaatcttaggtgaagattttaacatatatgtcaaattcatttatcacgtgatcaagctcatctaacatatatgtaaatcaaataaaaatcaccttaaggtgttatataaacgatattgtatagtttaggcggttaaatatccagtttcaaagtttaggatgttatagacgcatttttgataaaaaaggagaatatttgtaccttttcatttctaggtaaatgaattttcttttcatttacaatgcaagatacggagcttaggacatgtgttaataaacttcttcagcttatggggatctttcaatagtatgattcttcggaaatatttatactcggtatttcttagatgatttttttctaagctatttttaagcactatctctgtcctaaaatatacctacttcattctaaaatatatagcaatttctaactatatatcatcctttcgacttgctgagtttttttaacaactacaaaaccccgtaaagttcgttcatagtgtctcggtaccagacttaccatcattttgtaccaatttaatatggttttacccgcatagtcaatatagacatatggtggtagttgataagtttctcatccacaaacacctcccatcgtaccattcagctgtttataaacagctgccaaactttataaattatttttaattagtcgttctatgactgataacaatgaaaaaaaataaacaaaaccatcaaaagtattttatggttaaaacttatatatttgtgttcttaattatttaaaagttaattttggaaataaaagtttgatgaaaaaacttaaaattatcaactccaaatctaagttctaaaatttaaatttcagctacagctaataagtcaattaaagcacgcacattctccattatggctgagtataacactcccctcttctaacttatactctccatttttcgcgcaaacacttccaaatagttaaataatgtatttttcaaaaacatagggaaagtttttttaaaaatcatattaatatatttttatatttttagctaacatttaattaatatcgcgctattaagctatctcattttctgtaagaagggaataagttacaaacctgtactatccaactcggcctatattgtgtttgttatgtgggcctaatcattcgttctctacttctttctctctaagattgttttgtcaaagctcaaaggattaggtagtgcatggtagtgggttagtcttaaccagagatcactccatctcaatataaatcaccttagtctatgatgcatgtttttttaacctctttaatgacttacatattttaaatcacagattacttttaagatctatttgtatcattgtactctactcaaaatatataaaaaaacgagatccatgctggatatattcaaacattttattaatttaaaagtaatttatttaaattgtagaagtaacttagatatacaatagaagtaactctctaaaacattagaggtattactactaagttgaagaaaaaaagtactatgtggagtaaattcataagcaaagtatagagaatattttcaagtaaatacattaatgaaagtaaattcaataaagtttgaaattagtttacataaatcataaaagtaacttagcacaaaatgaaagtaagttgttacaatattaggcgtaaatctgttgtagggataaaaacatgagtctatctagaaattcaatttaaccagcacaaattataaatttaactaaaaacaataattaaaagtagttaactcagagcattatgaatgcataaggagtaatttaatcaaatctaaaagtaatttatatatctgataaaagta

SEQ ID NO: 51895 - DNA, 1642 bp, Oryza sativa
ggggggggggttcaaacatttgcgggaacaaacgaaactgttactactacttgtattaaggttagggcccgcttcgaagagaaggggttaacgaacgcaaagcaaatttcagaccaaattaaactattcccggtgggagtgagagatgaatcagaaatatcccatcccctgctctgctcgccagatggatatcggcagccgcgactcgtcttggcgcaaggagcggacgagacgactgagacgggagatttctctttcttttacgcaagtgataacattacaagactgctaaggttaagcaatgttcttagtaaaaccagacgaattcatctcccatctgaggtcaaatgttcaacattttcctgtgtgtgagcagtaacattttaatgtactcctccgtccctaaatataagatttttatgggaatagcaaaatgcccgtgcgttgcaccgggcaatgttatgtttgataaagtttaactgaacatttttttaatcacaaaggttttctttttgtttagacaattattccacgtgtatgtgtatgatatgaactatgttcctaacgcggtagcgtaatgattatatcataagaggaacaaacggtgaatgccttaggtcactttcacgtaagagtacatagacaaaaatttgtgtgattaaaaacttgtatttaaaataggtaagtttattataaaactaataaaaccagcttttacatacttactcatagtctcgtagtggtgacacatggatgatatatagcgcatagaattcagtatgttgtgtttcgtggaaatttttatctcaaacaaatattagagtaaaagtttcgatgattatgatgtcaaaaataaaaaaaataactaaaataatatcactcgtctattaagtatggacgtgtaccttaccaattattttttaacggaaattaatttggtagattagcaaactatagaaaattgaccgcaattaacaagtatactataattgtagttttttttaaaaaaatatcggttgcctggtcagataggcttatctctctcgctatacattacgattgaaaaagttaatgagaattctaatattggaattgctatacactataaattaaaagttaatgaaaaagttttcttggttttggactgaaagcccattccttccttcttatttagctataggctagtctgttctttctgttttcccaatatcagagcgtaaaatcaggattaaaagcccagaaagatcaccgatctgtcatcaacggtgacgggagattcaatccggcaaattaaagctgatgaaagggaaaacttgagaaaatgatgagggaggagtggagaatcgatttttataatcaattggaggaggaaacgcaagatcgacatggcggcggcgctgtgctaggattcggcccgggcggcggcaggagttcggattcgggaaaaaaaaagcgacaaaagaccagacgaaaacaaaaaaacaacggaccaaaatataccggaagctttgtgtttttgtttttttataactatagatatagatttatattttctgagtaatcgatcataatttttcaaccattttaaatggctcaaaatattgccaaagaaaattatgtacataaccaattgaattaaatc

SEQ ID NO: 51896 - DNA, 651 bp, Oryza sativa
atcgataaagtgattggtgagagagtttatccgtgtttgctttgctgggcgaacaacgtatcaactgatttcacacttctcacctcattaattatattgaagtaatttaggccatgcctagttccaaactttttcttcaaacttccaacttttccatcacatcaaaactttcctacacacacaaacttctaactattccgtcacatcgttccaatttcaccaaacttctaattttggcttgaactaaacacacccttagtcaactaccttgctactactgcagtaaactgttgttcccacatgaagtttcactcttttgtctgttgattacggagtttatgagtactcatgtgtatactgggtttgttcttgcaggtccaacattgtgttcttgcaaatgtcacacataataaagtgccatcaaatggagaaagagtcaattgtttgaaagaggaaacttcaccgagctgccggtaacgtaaatgcgaagcgactcaccggcagctctcccggcaaacttacggcaactgatacctttttttgcatacccccctttaaaaccatgggattcggggtgcattggatcttactctttagttgtattaaagaaatggtgaacaaaagatgggcgttgtcattccaccgagaaag

SEQ ID NO: 51897 - DNA, 1207 bp, Oryza sativa
gtattatgcctcaaatttgatgataagccccaatgctaaaccggtagaaagcgcgcaaaacctcttgccaaattcaccttaacaaaattgtttctcaaaagcgctaaatcacggaaccaacatggcaacatgggtggttcactcttggaattcgcacgcagatgcacgcagctagtagtaggcgtgttgatccagcgactgaagcagcagcgcagcactcatgtgagacggtgagagtctggatgatgactggcgactttgttaggactcgggaccagatgagcatgagctgcctgcctccctcccacgacccacgcacatcgcgatcgaccttgctttggcacgtgatgatgttacactgttctctactttcttcgtttcataaaatacgaacctctagttctattactatcatttttgtatttcataaaacggagtaaatagacaatagtgtaccatcacataataatagtaatagtactagagtttttttttttcttttatgaaactactctacccgtcccataatataagatattttagagggatatgacatattctagtgctacgaactgggatagagatgtgtcacattctttcaaaattctataaagtctatcaccggtctctaacttgtaccgctgtgtcatcctggtccctaaactcgcaaatcgatcgtttaggtcctcaaacttgttcgactgtgttatcccggtccctaaacttacagaactctcgttcaggtcctccaacttgttcagttgtgtcaccccggtccctaaacaggacggtctaaaatctttatatcaaaaagtaattcataactttttcatgtgaactctaattaagacaaactttatatcaaaattgtagccctcgacgcgacctacaactttgtagttgaaaagtttttgaattaaaactgtttagggtcccaaaatattgttgcatgttatagattttgaaattttaattttaaaattacattttgggacaaaaaatgacttaaaataaaaaaattcaactacaaagttgtagatcgcatcgagggctaccagtttgatataaagtttgtcttcattagagttcacataaaaaagttatgaattatttttaaatataaagtctttagactgtctgtcctatttgacccagatgatattcaaatccaaatttagggaccggtgtgacacaactgaataagttg

SEQ ID NO: 51898 - DNA, 3615 bp, Oryza sativa
cccggtaaatatatagtagctccgccgcatatatgtaggtataagacacatccatatatatgcttcaactaaacaaaatataacaacttttatttttctagcaagaacccaagcagttgaaagaacaaggtctaccatccctatggctatcaaaaacgaatgagagttcaatcacatagaggaaaggttgctatttcccttacagccccattaattagttcattcaattgttcagtgtttgtcctgttggatgcagatccaaaataaaagtgtgaaatggcagctagatggtactgggttattggtaatgggccgcttgttatgcatcatttttaggctaagttaggtggtttgtgcacatgtggatgagcatgtggcaaaaacactttaattttaagcatgcacacaaattttcatcataacaacgtgaacatattgaacccctcaagtaatagaatgaccagatgaaatataattccacccttatctgttgacataggaaagcaataatagcaagaagcaagcctaatgaaacaaaagttgctcatacgtgaaaattaattgaacaatgaaaacaattaaagcccctttaattacctttcaaaaagatatgcttgcttttgcttatataagacaaataaatatccatatcctacgtggaacaggtgcgagacatgcaatttaataaatacccatgaagtacgtcatgactactcgatttcctgactgaaattagctttgatgtggtaattacctttttgactatataatctataagtgttagtaccatcatgaccttctagggtattaaagtgacttgtgaatttgacattgaattttatgggctttatatttttcaaggcctcatgggtcacctacaagtgagaatcaatccttgcccctgccctggtagacccacgggtcgaaatctggccccgtccccaaccccataaggacaggtacatatcggatccccgtccccaacaggtattttgccacacctagttgatcctagcatatgttagcagtgttcacgtagaccataatctagatgatatagaccgcatatagatgctagaagatgggttatcatcttgtttagggcttaaactgtgaattggactttttgaccatctagtcggccaaagacgatcctagaccgtctagactacacagttagacaacattcagaagagtgtaaatcataaacttgtcgtttagactatggtctaggcaatgggccaatgcattttttatatgacgggagttgaaactttaagcccaacccaaagcccatatggtttaggtttttgactgcattccaaacccttctcttatactctaagccagtcactacgacaaggtcacgttgcctctattctattagtcaccaccctggagcttgcttccacctctctccgacccatggtttacgggagtggcttcacctatcatagcatcgttggttctccaatattttatggaacaggttaagatattatacatgtgtgccaagaaaaaaaatatgccgatagtatattgtatggtatatcgtttaaactggctagcctctagaccatgggtcactgtccatctagtgtttagcatctaggtgaacactgtatgtcaggtactttcgtatacttatatcaacataatttatcctttcatcacagctattctggattttcatattaagttaggttagtttttaatacccatatcactataatgtattatttttgcttagcaaaaagatgttaaattttcttgggctgatgacatctcgtgttaaattaccaatccgtaaccatgaaaatcacccactagcaataattacatatttaatctcatgcaagtatgcaacatcatctataatttatttatctaattctacaaatcaacatgcaagtatatctaataatcatccctcacatcatttccacaatattttaacaaatctatttatcatttttataatatttaacatatacttatcaatatattctacatcaaagcgcggatataatttgtttgttttacgataggtactgataaaccctcatgtttcattattttttttccttttactcctaggtcgattgtcaaaaaaatatattaaaaatacttaataaatcccgtagcaaagtgtgtggaatcacatacttcctccgtttcacaatgtaagtcattctagtatttttcgcatttatattgatgctaatgaacctaaatagatatatatgtctagattcattagcatcaatattaatgtgggaaatgctagaatgacttacattgtgaaacggagggagtagtgtttatcatattcaatgccaggtttgattcttggtgacatagggcatcctaaaatatgtattgtagaattaatattgagtcagaatgtaattaatgattggctaatgttctcggactagcatatactcgtataaagattggtttcatcaggctttcgaactaaaattggggcattaatgaatcggtttctttgatcatattggttgcttgccatactatagaaccactattgaactcctgatatatattgtcagttgagaccacaaaccatatttaccgtgtgcttgcttatttccctacaatgttttttttaacagctaacatccaaagccatgcactgatgtactagtgatcaggccgcggatggatttgatcaaaagaagtactatatcaatttacagtttatagtgcgttacctgcaattagttttttaaaggagatttatatgccatcattttatactacggtgagattcactttgataaattgtttctttgctgcttctgcagggttgcattgcaagtttattcatatgcactagttctaaggaaatacctcataaagaaacaagcgatatattgtgtgcaaattgtgcttttctattctgttgtgtcttctgctttgtcttgttacgtaattatcgttgcaccatgatataaataatctaataaaactagaggcgcacaataggcacccccggcttataaaaacatatggatttcatatttctatggagaaggatagagtccaaaagtctcagcacggaaacgtataattagttccttttcttttgtaatcaaatttattaaaagtttcaattaatatgcaaattcttaattctatgatcacacgacaactaatttaaaaagtcaataataaataaataaatataaatactccacccaaacattgttagatgttgctaaccaatttagaaagaaaataagccaaagtatttaaccggtgatagtaaaatagaaaaaaataaatatatgatgtttattacatccagctcgtatcaggagtggattggttttgccatcactcttacccgactctgcctaaccgtcagccccgtcctgttccctaacaaatccaccacacccgttcgcgtgacgcaagcggacagcacgcgcgacctctcactgctacgtgggcccttatccaagccacgtcaccctgatctatctaaacccaccttttttttttcctctgaagtaattaaccacggtaaataaattggtcgaaacgggtaattaacgcaatgtgtgggagggaagagtgccccatataaaa

SEQ ID NO: 51899 - DNA, 626 bp, Oryza sativa
cttggcatccaccggtcttatccaactttggtcacgcaaagctggccagggaatgggtcccactcttctctcttctccacacaagcgatttgtctacgtggattaatattaccatacgtcgtgtgtgtgcgttgtgaatggcctacgagtactctccgtgagtgcatgtctcattttcagtgctttccttgtctgcctctcgatcggatcaatgcttcatgcgggtccggcaacctaatcaagctagtgacagattctcttctttgtctcgcaaagttgcagacttgcagccgtactacgtacgactagacgtatacttgagccaaacagttttttactatacgattagatgggcggctaatgctagagagagatcgagatcaaggacagtgatttgcttaattaattgtggaccatcttaccttacgtaccagcgatcgatcgatcgacctatctatgctttgcttgatgatcgaattgcttgattgctttcttaaggaaaaagtacaaattatcccccgaactatcacggtcgggtcgtttgaatccccctgaaccacaaaaccgggtattcttcacccccaactatgtaaacaggataaattacccccctggacccaatccgc

SEQ ID NO: 51900 - DNA, 677 bp, Oryza sativa
gggcaggatagagagcggagcgagaggaggaaggggaatggtggcggctacggtttgcggaagggggttagggtttttttttctatttcacacatacacgccctcatcttatacttttcagagacgcggacaacttttccaattcttctcttcattccgatataatattctattgttcacataggtcctctaagtaaaaacacatagcgttaaaactacgggattgggacctacaacacattatgaattgaatcagggactttctttcaaaatggccatcaaccacgcggaggctggagcgctcgcgaaatccgtcctctttactgggtacacgcctacgcaaaactcttaggaccgagcagcctggggtaggttttactactttcgatttacatctacattctattaaatgagtgcgaaataaaaggggttcaactaaggccccgtttaacgttgcaaaaactaatgcattattttattttggggacacgatatttagcggcatactttaaacacatgaattaatgatttaacggctgatgtctcgatgtcttctaaatgcacactattagataatcagatgaaacatttactgctatcagctaaaactaacttgatataatccttataagccgatgaaacgtccatataacccatcagctactacctcgatgaaa

SEQ ID NO: 51901 - DNA, 1063 bp, Oryza sativa
gataaactcaaaaacgagttcgattcggataaaatactcaacggtttgctccgattcttggggggaaagatagaggagaacgagaggatcaaaaccgctcaaaaatccggactcggggtggcgggattgggtgcgggatcggcgcggcaaggcggcgcggcgaccgactcgggctctgcctgagttggaagatgaacagtagcgcagggaggaaaagtagacttttccggctgggctgagaggagaggaggcggctcaggttgggccggcggaagagagaggaaggaaaggaaggaatgggccgaaaatggcccaagctgaggaggaggattttattactttcccaattaaaataatcacttaaatgatctttgaattgttaaaaatacttcctatgctcaaataattccaaaaaaaaatcttgaaaatacttggacactcaaagtacttaacaaaattataattagaccatttaatgattaatttaatatgtgggtaattactgaaatgctctttgtatgattaaaattaggaattgagctccgaaaaatccgagaatattccagagagtataattaaccatggagaatttaataaaaattaaatccatccatgctttatatttaggaaattttatttcccacatttaacttcacttgtaaattaatgaacatttaatataaattctgataataatttattaaataattttataaatcctgaaacaaaaatcaggatgtgacaccggtacgccgatcgacgtcgcagcgttgtcctctcctccagctgctcctctgtttcgccggaacgccgtcgcccgtgctggcctctccatcctcatcgtcgccgacgtcccttcggccgcccgttcatcctcaccggctcgtcgtttcacggcgccgcctccgtcatcgtcatcgcagcggcgtgttccacaccgtcctcgtctccgtgcagctgctgctggctgtcccttgtcgcctcctcgccggccaccgtcgtcgttgtcgtcgtcctcttgtcgttcccgttcgtcgtggtcgttcccacgcctcatcgcgtg

SEQ ID NO: 51902 - DNA, 1017 bp, Oryza sativa
tgtgatggttggaatggtcggtaataccctccaaccgtcattggggatcaaatccaaccgtccatccaaaccgtgcatccatcggcgccatgggaggttcggccgaaccatgggctggcccaacccaacccatcttcgactggcggcctcctttgttgtcctccttcatagacttgtgaattttggcccaatgtgtcgtgttatttctgagttcttggcccattcatacataagtctggttctcgacaccgtccaattgatttatcgtccgagttgatgtcgattctcctccactttattgtcattcgctgcaaaaggttagtatacctaatactagtggaatattattattgtaacaaatatattgtcggatcccaaaactaatgattcggaaaccgacatgtttaactgtatcaagccctggatcagtagattgatacagcttcaacaatctggattttcattgcgtacatttgaacaaggctccaaaggagatgttattacataaattaataggggaatttacaagattgtggctaactattacagcagaagctatagagtgtctcaactctaatattttgctatagacttaaaccatctaactaatctagatttgtgaactaggttgaaataagactaacttatatgattgaactcctggctttggcaagaacttcaatttaactctggaaaaaggaggttgaagcaagggtgagtacaacgtactcagcaagctattatattcaataatgaatgtataaaaaggtaatatttgagtaggattacgattacttgcagaaggcagagagtatagaaatagaaagcctgatgttttaaatgcagcagcatttagtaaaatcttgaattaggtttctaaccaaagtaccatatgagtcccgatactcaattccgtgagcacggctattcgaatagattcaggtttactttactgcagtaaatgtacgctttacccgcaatccatgacatgccaatattcattagcttagtcatggc

SEQ ID NO: 51903 - DNA, 1408 bp, Oryza sativa
ccccaattaattttggaatccaacgcttgaatcgcgcggattcgagagagcaagaaactagggttcacgggagagagagaagagctgtgcgggaggaggaagaagcgcctggcaggcgggtcccacgcggggcgcgcggtcagtgcacgtgcggcgctcgtgcgcacgcggctacgacaggagggcgctgcgactcgggcaagggcgcggcttgggccgggcggctgggccgaggcaggccaggaggaaggaggaggagggagtgggctgcccgggaggaaagagagaaaaacaaagggaggggagagggacttggactgcgggccgagggggagagagggagactttgggccagacttggcccaaaggaaaaggaggattatttttaggttttctttttaataaactttgattattgtttttgttgcttaataattatttccggtgctctgaaaattcaagcaaaatttgagggctccttttagaccaaagagaatttaacaaaaattctccgggccacattcgaatttttcttgtacgtattttagtgtttgccaatttcttttcgaattttaattaattctattattccttttagagaatgatttttatttttgggatgaatttatcaggacgtgacaaatccaccccccttacaagaatctcgtccccgagattcgaggaggctagcaagaagataggttgggcggtcttctcttcttgtctggcttcttccgtcgcgtcttttataacaaacttgcctagcaaaacttctccactctggactgctgggctcgatctcctattgcaaatggaatcttctcttcacctgacttgtccctggttgaacctttagctgacttcgactgggttgcgacacttgaagatggtgcttcagttccagaacttcgcatagttcatatttttggagtcaacctcatacaagttacccacttcatgtcatgcgtcgagatcagctcgtcattactaggataccatgcttgtcatttacttctaacttgccaccaactgcctcatattagctttcctgctctccgggtgatagctacttctgctatttgatgcaagggtcgataactttgcctttgaattatgcttcccaagagaaccaacttatcccacttgatatactttgacgtcttcccaaatggctttactgctggatttgttattgtctaatcattatcctgccaatttgaggcttcgttgttagatgcgattttaatctgacctctgtagattatcttcgaacatatcacttggttcataactgggaatagctctcacgaacaagcaactcggattcacttcctttacatttggttcacttcccactattctcttcatgttgtcatcatttagcattcaacatattcctttgcacctt

SEQ ID NO: 51904 - DNA, 1505 bp, Oryza sativa
ttaaatgatcttcgtgactttaaaactatttctcgagctccgaaaattcacggaaaattccggagagtacattagggcacaaagaatattacaaaatattcccggccaaagatttttaagggaaaattttaattctcccattatttcacttgattaaattgctttaacttttatttaatttccagaaaatgcattattaaatgatttttaatcccgaacgaaaatcggggcgttacaacgggcgacggcattccggcgaaacagaggagcagctggaggagaggacaacgctgcgacgtcgatcggcgtaccggcgacgtacaggagccggccggaggcggggaggtactggacgccgacgaggaggccactccggcgagcttcgggcgaggaggaggtgatgccggggatgagggcagcgtcacggagccgagagaggtggtggcgacgtcggccggcgcatgggaaacgcgacaatggcggccggaggcggaacagtggcggcaacgccacagttgccggcgggggcgcacctccaagggtctccgtgcaaaacggagggcaggccgggggagaggaggctgctgcgacgccggggaaggcggcggcacggccggacggcgcgtgggtgaggcggtaggggcggctggagggtggccggcaccgaggaaagagaaggaggaggcggggagaggtggtgtggtcgcgggggagctcgggaaggggctaaaacgatagaatgcaaagagggggttccattttatagcggaagggaatgagccggccacgggaggagcggggaacggcggcagaaaaggcgcccggcggccatggaaggcagccatgaatggcgcagccgttccggtcaaaatagtgcacgattaaaggggagattagggggaaaagggagaggaacgaaaggggattaattccccccaattaattttggaatcccatgcttgaatcgcgcggatttgagggaggaatggcgctagggtttacgggagaaagaggaaggaggccggcggctggaggtcggggacacgcctgacaggcgggacccacgcgggaggcgcgctcaacgcgcgtgcggcgcacgtgcgcgggaagggagcggctcagcttgggccgggcggccggcccaggaggagatgagggagaggcggcccgggggagagagggaggaggagggagtgggccaggagggggaggcccaagaggagggagagaaggagagggagagaaagagagggaggaagggaggactttggccgcgggccgagggagagagagggaggctttgggccagacttggcccaaaggaaaaggaggattatttttaggttttctttttaataaactttgataattgtttttgttgcttaataattattttcggtgctctgaaaattcaagtaaaatttgagggctccttttagaccaaggagaatttaacaaaaattctccgggccacgttcgaatttttcttgcacgtattttagtgt

SEQ ID NO: 51905 - DNA, 1002 bp, Oryza sativa
tcaaaatgagaaaagaaaatgccgagtccgggaagatatctgttgcttcaattgtcaaggaatgggtcatttcgccgacaagtgcccaaaaccgagaaacacagctgccagcacgtcagtccacgcaactccctgcaatcagaagcttgctcctcagcgaattgtcatccatgcatcccgaagcagtcctatagcccgcgttgcaacagctccaactccagcgagtgcattaccacaaggtgtcaatgctcaatttcagccccagccatcagttgacaagacagaggccactatcggcactgtacctttggatgttccagcacagcagccaagaaatcaagtacaggatgaagaacccaagcgtaagaaagttatttacaacggtagtacctgttaaggaagcagacgtgccaatcgccaagtggtcactggagcaaatgcagtacctgttaagcctagcgctagtcagaagcaaccataatactcttatatcagtaatcatatacttatgttttatagttgttccccgtcaatcatgtaataacagagaaacatgagattatgaaggagtttgataagtttatgaaggatccatgttaagattgcaagtgcggtgagttgtgtacactttgttgctgattagggagacccagggtctcatttccgtaagctcataatctattatgaatcaaataacctcgcgattgatggcgaagaaaatcaagtgatcaaccaaagagacatttgtttggactaagagtttcagatgtgtcttcttcggatcaaaggcaggcaccggttgtggagaaattggacacgttgctagcatgtgtctcacactcggcactcactatgaggaagaccatccaccaggggagtgtcccacctgcaaggtcacatgttttctgtgggaaggtacaaaccatgggcccaacgatgcccaactcagtggcttgtggaccaagaccgcagaaatccaacgaacaaccctacgatgtgtct

SEQ ID NO: 51906 - DNA, 2757 bp, Oryza sativa
aaatagggctgaacatatgtcaaaactagcaaatgtgtgtgctaattagtatgctcaattaattttgtttatcactatgcctgtatcactactagcagggcttgaagccaagaagcgtgaccaaagcaagtgctttgtttaatttatggtgaattatgcaaaatttatgtgtgtatccgtgatttgtatccgctcgtagaggaccgaacctgagaacgagaatctcgcctgggcttgtatccgctaacgggaccaaatcagagggtatggtaggatgacatgaatagagtttgcatggaaaccactcctaggcccgtactcatttggccggaccataggaaaaagtgtgaaatcatgttaaaagccatcaaatgaaacgaatttccttgtctcatacgcgctggctgagacgaaggactcaacaaagagaaaaaattcctttggcttgtactcatgatggccaagcctaggagcatggcaagaacataatcccttggttcgtactcattggccgaaccgaaggacacagccaaagaatctattaacatgagtagagaaagacgaactgagagatttttcgactcgtacacaatggccgagcctaaaaatgaagggagagcatgattcccaccttgaaacacctctgattcttctggcacagcagagcgaggaagcagaggctgacgagatggcgtaggagcagagcggcacggcagcgtatattgcctagcaacaagcagcgcttctgcaaagcatacgcacagcacctagcctctacgctaatctcccctgtaacctctccccagcgaactcttctccctgcttgccccactccctctatttatagaggaggatccctgccattttcaagcagccgcgcgcgcccttagcatttgaaaacatttgaatggagcatgcagatcaactgatcgtgagacaatgggttaactaactgattactacatgaagcttcctttatttggatgacgtgtgggccctttcagttatttgctgagtgcatgcatggttagtggtcatcgtggggcaatgtattaactgtttgagtactccaggaagcttcctttatttggatgacatgtgggcccttttcagtttattgggacgaacatgctgttatttgccaaatgcatgcatggttagtggtgatcgtggggcttgaccacgttttcctttgctttcactgacatgtgtctctttcttttggtttcaaactggtggtggattctcttctgcatcatgcctaggctattttttaatccatggaaaacaatcatttttggattccttgatatctctgtttaattgggcatctcaatttatttatttatttactttaatacacgctttgggtatgagttctttttaaagagacacgcgtatatattttagtcaccatttttatcgagcgggctgttattgccgtaaatttattttatgcgacacgcgtcgcgtcctgacgcgcatattatcacggtggcttcctccagcccatgtctagctatcgagataaaaatgctggactaatggcaaatgcaaccctctttagtttggcatgcgcgtgtatatatatccacgccattatagcggcgtgcacgtggcatgcatttttattttaagtcgcgactatttggggcacgatttttcactagccagataaacatctattttggcttacattttaatttttgtatgctattttatatggtgggcatgccttttctgaaaatattcggggcgtgactatttcgggtcagtgagaaaatcccacttaatggccatatgtttcaggccaaatttcgtatgcggatacaacgagaaagctaagtattagcgttcgccggtccgacgaaaagcgcatggaaaatatttgttcacgctacatatgtggaacgcgcatatgcattcctattttaagccaaaaattattttgtccaatataagtgaattacattttatttcatggccatttatttcgtggccgctatttaattaaattacttcaccatctgtctctcgataaaattcttattatatatattttgtacgcactatatttgagataatacatcagtttataatttaacaaattatatttaggacacgagccaaaatccgtgtaaacactaggaaaagaattggtggccaaccggaaccactagggttcagccgaaccagggcggcgcccaatcagcctcgattttgaacttcagtctccccctctcgtctttaatccgttgtgatgcgcattcgaaggtagatcagtcgtatcattccagaatacatattcttccttttctcccccacttttgcaagcttcctctccatcttatcttaattcccttgctccatcacctccaattcaccaatagctggcaaatctttgatcccattcatcggctcttcctccaactccacatacaaccttgacggagagccgacaccggcgaatcaattgatcccggtggaacactacaccatggaaagggtgaatgcactgtgggcgcagccccttgcgacagtgccgggctcccctgcgaatctggagcccgttggcgagctccctggttcggcagaaccaggggttcggccgaacccccattggctccgttcggcagtgcgatccctctcccctcaccatgttacgaagaccaaaatccgaggggattcgcctgtgtgacggacgacaacgggcgagctcggtcttttaaaggcgtgacgccttttccaagatgatga

SEQ ID NO: 51907 - DNA, 954 bp, Oryza sativa
aaatacatttatggtattgaagtactttccgagtatatgagtacctactttacattatgttcatgttatactgaatatacggctagcttatctgggagatgctttggtgctggtatagtgtttgcttatgcaattactctatgtcatgacgatgatattagagtagtatctagtagtttagacgtggtgtctagattacgggatatcattatttggggttctatattacggatgagaggtgggccgctgatggtgacagctcagtacgggtattcctccgtgtcagtacataatcctaagttaattccctggggagggtattcctccgtatttagccctggttgtatggtcatgacgggctgtcgtaaggaactcggcagtcaggggtggcttctcgaagtacaaggagggcatcggatatagggtattagctagtatatcggttaactagaatgtatgtatactatgtatatcagaagtattggaatagattttctttctcttttctttccacttagcttaaatgatatattatgagaatgagtagttaatgcttgtgtatcactctacccatggattatcttaaccccagcttacaatatgattatcacaagtaatatataaattattagtcaagttctctgtacatggtcttcccacgggataaaacaaatacaatacccttggaatactctcgggtaaaatgctacaatggtatacccgtgcgctagcggatgaattctgtaaccataatataccagaagtatttctgtgctattgctgggaattattttatatttgcctctgtataatcattttcctttgcaggctaaccttggttgttttcacttatgttgtgaaaacagggtagtgcatgactggtttcaacttgccgaaaaacttcaaataaaatccagaagctttcttccagagcgtcaggccgcgagtcgctgc

SEQ ID NO: 51908 - DNA, 749 bp, Oryza sativa
gggggaaaggagagaagagggagagaagtgggccgagcgggcccaagaagggaagggggaaaaagaagacttcttttagagtttttctttttataaaaccttttcaactttgtttacttcttaataattattatttgtgctctgaaaattccactaaaatttgagggctccttttagaccaaggagaatttaacaaaaattctccgggccacatttgaatttttcttgtacgtattttagtgtttgccaatttcttttcggattttaattaattctattattccttttagaaaatgatttttatttcgggatgaatttatcaggacgtgacagtagtccactccgtgtggataccctagggccacgcacatgccccgcaactccaagacgaagccagtcatgtccaaaccacgacgggtgacgctgccggccatctacaaacaaaaacaaaaagaaaagcaacattttcaaaggtcagattttggcgataaatgaagcagcaagacagagagagactagacagttttcacaaataacaaaggatttttatttttgaaaatattgctaaggcttgggatctacggctcgtcctagggtcaagggtggctctgataccaacttgtcacgaccggaaataacccaacgggctttcctgacgtgcgtgcattaatccttgtcccaggaggcaaggtacaccaaaagttgatacaattcagagtttaacaagcggaagcgtaaatagttaactt

SEQ ID NO: 51909 - DNA, 599 bp, Oryza sativa
attcctgcagcccatatgaacggaaatagagaaactgaatcacaaaatcacaaatacacaacaatgaatcaaatatccaaaaaactaaatccgaagaactaaatcaccggtgtcactgctcatcggaggccaagcacgcccatgccctgaggctgtggcggcttggcaggcgcaccgccacgtgccgcgaggagggtgctgccacagagccacttctagagaagaggatgatgccaccgagaatagggcgtcgcccgccagggaaggagctccgctagggaaggcgccgtgcgagggcgccatgagtcgtggcagcgggggagggggagcaggagcagtggcgctgccggcaggggtgggacagtgtgacgggaaaagttgccggtgggaaggagctccgctggccgtggggagggcgccgcggctgaggtgccggctgcaaaggttagtgcgccgctcgccggggaaggcgtcatgcgagggcaccgtgggccgttgcgaagggggagagggagtgggagcggcggcgctgctagtgtgggtggaggaggtggaggggaaaagtccccgccgggaaaggtggaaggggccgggggggg

SEQ ID NO: 51910 - DNA, 567 bp, Oryza sativa
cggggcggcgggaggaaggagatgacgggtgggccccacacgtcagcggcgcgcgcgcagggaggaggccgagtgggccgcggggaggaggagagagggggagggagatgggccgaattcggcccattagagagaaggagggattttagggtttttctttttataaaatcattttaactttgtttatttcttaataattattatttgtgctctgaaaattccactaaaatttatttacacattttaggcttttaggaaatatacaaaaatcctccaagccctatttgacttttaactttgcacattttaatttttgaaggctttcacaggcattttaattattctaggcataatttagaggatgtattttagggtcaatttgggacgcgacaaacctaccccccttaaacggaatctcgaccccgagattcggaagaactggcgaagagatctggatgggctgccttcagctcatcttcacgctccccagtagcttcttcctcgtcggggttgctccattggaccttgcaaaaaccgattaccccgattctggtcctgcgcttcatg

SEQ ID NO: 51911 - DNA, 840 bp, Oryza sativa
caataatccccttttccttttcaaaaataattcattattgcgttataattcaattaaaatccatataaatgatttaatccgatttaatatttgaaaattcataactaattaatcttagctcggatttagttcgttcaagtctctaaatttttctaaaattgagatctacatgttaaaaatatccacgtgtattgtttatgcttgtttatgtgctgttttggtgattttgttcttttctctttagattccgacgttcccggagagtccgaatttgtaggagaagactttgaagagttccaaggccagcaaggcaagtcacacagatcccaaacaaccctttgagcatgttggtcccgtttaaagctattgtttctattcaactattgcatttattttcgaatgtcattgggtggaattaacctattgttttgttatagccctttttgttcttgattactctattccttgataccttgggttattataacttgactagttgagctttatatatgggttcagctggatattagatataattgcttagccatgcttagaaacattagcacatagttgggataacttatgcttcactattatttaatgatggcttaatgatagctcatgatggttaatcatgattggttaattaattaatttgccaactaaaacctgataatggtgggttgtgagcatatggttttgatggttgtgctcatgacaattaaggaccggttcacgattttcggttgtgaaacatttcccgtgccaaccacaagccagcgtgggcaacgactttactttctgtatagtatggttcatagtagagcgggctgcaggaat

SEQ ID NO: 51912 - DNA, 651 bp, Oryza sativa
acacaaacgataccacaagttagcaccacaaacaactcaggcacataatgatatatgaaagcaatctcaaacgaaacaagtaaatttcttttttcccttcttttttttgggtacagcttttctttctttgttttatgcacctttctgccttttttttctcttcttttttttgattttttaaaaaaaaccaactcaagggcctcaatgcaagattaaagggactcaaatgtaaatataaaaattatagggactcaactgtaaaagtccaaacccaaaattagatatacaaaaataaaatgctcatagattctgtatttgcaaacagatctccaatccgatactaaaattttttcatcaagctatatgggcaactcacagtatggattgaaaccgtgaggagaggagaccgtggatctaggaggtctcggacacgactcactaggtggagattgactcccgtcgaccttaggatcgaaaggccccacgtaaaaacagaaatagatctctcccttcctttttctcttctctgtgttggccaccaaacggaaaccaaaccaatctacacactaattcaggatcttttgctgaaaagaggctaggccacgtcattagataaaaaaggaaccgttggatgataactgtggcagatta

SEQ ID NO: 51913 - DNA, 1358 bp, Oryza sativa
attcctgcagccctgaggttattgaaaggctatgccgtggcaagtctcattcgttgggacataggctcatgtgttgcgcaagtcgcggagtacgggtaaagtgtacatccactgcagtgtgagtaaaaccaatctattcgaatagccgtgctcgtggatattgagcatcgggacatgtattacacttggctagactctaaattcttaaattgagtgggatgggatatgcatgatgattttgtactggcggatcatcctctcgagagacgagaaggagtaaaccccagaaaaccattacggccagtaacgggaagccatctttgggaagacaatagatggtgaacagaaccgttgctgtgtaataaatactggaattaaaactggattagtctatgctagataataagcttgtgaaaggaattgtgaaactagctttatgcaaataaaccaatggccatactttgaatatcactatcatatgcattgttgttatgatggcttgctgagtacggttggtactcactcttgctattacaaaatttaatcagtggatggcaatgaagtcgaggaggatccctatgcttatctttaggaggatgcggaggataacggcgctccgtaggtcttagttacggccgttgcctgtggccatggcattgccgctacctataatatgctgccttatctatttctgttattgtttgtattgtggaccgtttagtcctatgatctaagactgcctgcgggcctatgatgtaataattcgcgctagacaatctttgtatgcgcacttgatatttcggcaatgtaatcgtgagtaccagactacttgatccagggaaatggtactattaacaagagtgattcctgttataaaaacgggggtctacagctagaggcagctagcggcgaccggagcggcagcggcggcggagaggaaggcgatggcgctagggcgatagagggcacgggagagtttggcgaaatggggaaaaagagagagggcagagtggggatgcttaaataggggagatggagctcggacgtggccgggagaggcgggaatcgccggccgatgtgggggaagtgggagaggagagagaggcgtgattcaaaaatctaatcccggccgtctcgagcgcgggcgcgggcgggagagagggggaattgggcgcggggaacgctggcgcgagggcgacgtgggcgacgtggtccgggaggcgcaggagcagggcgcggcggcggttgcggggcgcggtggcgccggctggaggaaggggacgagcccgacaggagggccccacctgtcggtgaccccgggagagggaggccggcggccggctcagctcggctgggcc

SEQ ID NO: 51914 - DNA, 1753 bp, Oryza sativa
ctgatgatcttcttgagtccgtatttttggctttgtaatatatatgatgcaggtatgtcacaatttgtccctaccgagctccacatatcagccttagaatagggataaattctggtacattttgccttggtgaggatccaaaaagaaaatatacatccttgagagataagagagaaagtcaatacgaggaaaagagctagtttgcgaaaattcataaaaatcccatgagtctggcacagaagcaagagggaatcgaatcgagatcgttccatttatcaattgctcaagatggtaagatagccattgataaagttcacaggtacatgtatggttgtaaatgattttatatgcctgattcatatcttgaagaaattcattctacactaacctttactcagggatgagcaaagaactaagtgtggggggttttgttggcggctgttaaattttgattctataccgccaacatctgcataaaagtccagataataaaacatccaacatagtgataggtgcttaatctcacatattccacaagtgttggtgtatatttgtatgcaggtgataaaccccgaagttgggaggaaatctagactaaagtgaggagaatcttgtatcaacacaaggatgggttgtgaacttcatcaaaataccagagaatcagcccaaaataccgaggaatggatagaggaggatcaggggaggacatgggccaaaggccaggcctggggggcatggcccaagttcggcagaaccctggtgatcaccgttgatctcaggttttggcatggacattcgagatcactccttgatggcggttgcggggcagttcggacatttccccttcgctaaccgtcatacctacctctatataaagacttcactttactcacttcgacacacacttccaagcttgagctgaattataagaggctctattgtactatattgcatactagaataggaagagagtagagtagaagaagtcggaagaattctggagttgtcgataatcttctctcatttatttattctgttaattactctgaattcaatataatattcttcctgagtaatttagatttatctcgtgagaattatttcttggttagtgcctaaatagcatacgggatcattgatcactatagtttatttatttatagtggttgctttagtgtttgatcggcactagagtagttattaattgcgtagacgcggtgtctgggtaattaatctacagtggttgctgcgcatcccacagtacgtttgaggtaggtgtagaggtggtgacagcactcaagagcacttaagtcctccctgtccgggtacgtagtagagcgacatctaggaagagcgggtggccagtgcccgaagtattgcgttaggattaaaattaagctttccgtagacactgtttagtgtctttggataaaccggaggaagatctgaccacacacgttcccttggattcaatacccttcgaatactctgtaggggaagtgctacatcggtatatccgtgcgcttgcggatcttatctgtgatcgtaagaaataccaacaatgatctaagccctttaagaaaatattttcttcacataggttgttcgaaaatagattttttttcttatctacatgctttaacacactaagattttctggaagaattttctctcgtattggatgtaacatccattatctacatgttttcacttgcccatcgtcattttgccacattgactgcgatcgagaagt

SEQ ID NO: 51915 - DNA, 1059 bp, Oryza sativa
cgtcatcactccaccaagtcgccctcacatctctcgcttagaccagtgcaacgtgcaacacgagctagctggcttcgctttggtcgtgggtctccatcgtcgccggggctcactagagacacgaacgacatgagtacgtcgctcatggctgtgttgtgatgtcattgctgttgctccgggtggtcgccatcatggactcatggttcactcacttgaatcagaaaagtaagggctaatgggcctttttttttttgacaacttctttaagggctcatatcatgaaaaactaaaatcctaataacctaatatttttgtatttgttatatttttattttacccgttgcatctatttattaaaatgtttaaataataaaaaaattctcgatcggtcccctcttctctgtttttctctttgttcctgtctgctctttttttttaaaattttttttcccctcactgtctaatcgtctttcattttttttcatgtctactaattaatatttgacttcaaatataatttgtaactcaaaacaatactcactctcacaaaaataaaaagattgatttttacgatttgttaaactccacacattttatttcagataacatacacaggtatattcccatagtttcttgtggtgaaaccagtcaatctggattcaaatctttgatttgacacgtgtgcttgaggcttccgtggtgacttcgtcaatctcaatgctcgtgttgtgagagcgtttatgtgtttcttaaaaaaatatatattctcgaaattcaaagtacatcgagtacaaaaattccactcgtattttatcagacttacctactgtggagattatgggtaccccatacccacacggcatggttatccgactagtaataggggataacatatatgtatggaatatgtaacagatcatgacttgggtattacgttttcttttatattatggagcggcctaaagtcctgatttgataatattgtaaagtagatttaggaagccgataccgtgttggttaaggtttctatcttgtaatcctgccccccaccctatataa

SEQ ID NO: 51916 - DNA, 634 bp, Oryza sativa
atgactatgaggattttcaggagttggttgacaaagcaattcgactggaagacaagaagaacaggatggacaatcgtaagagaggaaggattgttttccaggaggcacaaggtagtagccagaggcagcgtatcaagccactccaaattggtgaatctttttctgcaggtcaagaacagtcacaacagttgggcatcagtggtgagatcaactcagagactaatgcaagcaatgaagacaacgatgagcaagctactcaatcagtgtcatttcagcaggatcagtctcaagaagataacagtaatggaagggagcagcgggtgtgtttcaattgttatgagccaggtcacttcgtaaaagagtgtccgaagccgaagcgtcaacagccacaaggccaagtcaacaaccttgtccttacagaagcaaatgcagtgccggttgcgtctcaagggatacagctcagccaccagtttcaaagcggcattagttttctttaaagccttagaataattatcggagttatggaataagatagactgcagtttacctatgcctttttctttctagccgttccgaatctcgggacgagattctttgtaagggaggtagatttgtcacatcctgatttttgttt

SEQ ID NO: 51917 - DNA, 696 bp, Oryza sativa
caccgtccctttttgtttaaggcagtgcctcgtattcatgtaatgagggagaaatgtgtaatacagacaagttccatgaggattcttttggaagatgcggatatgtgattatgtgtataattgcttactgataaaggaaacctagggtctcatttcagaggaactatgttccaacctcgagttaataaccaacctgttgatggaaaagaaaaccaattaaactgtgttgggttaaaaagccaatgagacagtagttggggataggagtttggatacgctttttacagatcaagataaggattgttggatgaaacccataagggtacccgccatgcctctacatagataagttcggatatacctgcaaacagttaagaagatccaggagacatcaatatttgagaacataatagtcgatggttggtaattagtctatcaggtatcagaaaagggtcaaaggtgatatggcagaagaacaatttggatgctccccatctcgaggcagcactaaagatgaccatcggcaattaaaccttagtggcatagatacagatagcaagcaatgtatttccctgaaggtagtcagtgcagctttttggcgaaccacatcaaggtttcaccgaaaggcagcgagccaaaggacctcatcgtccccagaagcgtccgcaatccacattagagaataccacctgttag

SEQ ID NO: 51918 - DNA, 1035 bp, Oryza sativa
ccttggtctaatggcttgcacaaaagaacacatcccctatttatattcccactgcaaaatacattgggcaaaatatgtgagcattagtcttgcttgatcagggacaggagtatacgccttggcatgccaggtgcaaaagaccgctttggtggggtgatattatatggagccctcaagtcctaaagggcaaaatgtaatgtacagtcagtttttctataacaaatgagcacacaggtaatatatagttggctaacaacgtttacttacattttgggggctgcgggggcagtttgtctacgaacagcgcacgcacaactgatgctttctgacaatcatgttcacgaggagatgaactacagatgcaatttgtttgagccatgagaaaactcaaagaaaaaaaataaggaacgtaaatatgaaactgtgcattgtcacttacccttcctgagcaagatcctcatcaattacagaagatttatgttttttgtctggttgtgccatagccaggacctgataaagcattagtggtcagttaggtttgataagggacagacatacatatttgctctaagtacagaatatagtgctagcctctgaagtaggcggtgttgtcccatgctgatcatcacggctatcagttgtggcctatgcataagcaatattaatataagaatttacaattgtttatatgcaagagagtacacattgctgcagaatgaagctattagattatacctttggatctggaagcaccagtggtgtagaaggtgtcatagattggagagaagagccaattatcgtgtgcggttcaattgcatcagctggtgatgagccatgttgagaagatgccacagaagcatcatggctgggcagagtacttgtgtgggctgcatctagtgaggctagcataagggaatccacttggtaagatatccgatttctttgcaatgagccacgtgacacactagttctaatgacatattgttttccaaaaactgctttgatttctgatggaactatatctcgtgctccttg

SEQ ID NO: 51919 - DNA, 530 bp, Oryza sativa
aattcctgcagcccgtatggaggaacctgcacaaggtatgtgtattagtgtatttgtatatgctccgattaatcttggggacctaggtatactcttataaatttgtggtgctagttttgttcggtctcttgcatcttgtttggtctgaaggagctgtgtatgaggggcttgtttttttagatgtgtgattatttttcagttgacccgtgttgatctggatctttatagcagcatatggtgatttggatgatatatatataaatggatgattataggaagttttaggaataagggaagaaaggggatggttttatgatgtcggtatggttagtgatgttgtttttgttatggtttaacagagcagcgtcggctcatgcagatcaggtccaaaacgttgctatctgaggttttgagaggcataggcgcaaatgaggcacgatacagttgccgtgctgtagcagatggctatgttgggtttgctgaggcaactgtttatggtgcaagaggacctggagagccttttgttgttc

SEQ ID NO: 51920 - DNA, 1291 bp, Oryza sativa
ttaccaataaaaccatatcaccaaagcgatcatccaaagtattgatccagtagaagattttcgatttaattcgaccagggtaattgctaatggatatatcacaggaaataccatattggttgctcacatactgaaggactggaactcttgcattaggaatgaactccatatgtctagcaatacctaaataaggaatgaaaacagataagaatatcctgtaaattcaacaaaaagggttgcattgaatgaagtacggaacaaaaagaagatcgtgaatagcttgatcaaaacttattcattacagtgacttcacctctcacaagatatattgctttcctttttttttttagataatggataacctggccgctgcatcaaagacgcgcaaagcccacttattgctttccttggtgcatgtatatgcatatagtgactatttgtttgatcacaaagaacacacaaccaaaacttctatcatttcggttaaagctgttttcattaatcgaaaagaaagtttacctcgcttttgcaaagctctccttacttctctcagggtatcttgcttctttctcttacttatagggagattcaaggcattgaacagctcaactgacacatccaaatcacctgattttgcataaagttgtgatacgaaggatccaaaaggttttacagaagcacctataaaggaaagttaagaactcagaaaaagaaacactaaaataattgcactggtgactttctctaaacagtacccttttccaacatggcaaacttcataaataatatatgcattgaggaagacactatccattgtataacaagagaatgtaaccaaaaaaaaaatccagtaaaaacattatgtgacatttgagcagctccattctggctatgggtaaccattcggtttgaacaattaattcggattgattctttggttttctcgaattttggccatccgaaaatcaagaccgaaattcaatgcaaaatcataaaggccaagctatttggttttggtcattttggttcggtcctaggtcatgaccgaactgattgatcaatttcaggacatgtttcggtagtaaaaaatttggcagcaattccccagtttcaggacatgtttgacagtaaaaagtcacaaaataaacaacaaatgatatagaacacaaagatagcacttgcaacttaacatcaaaattcaactgttcaaacatgatacttaataggcttaacaggttgattttgcgcttattaactatatttcggtcaattcggttaacccaggcctaat

SEQ ID NO: 51921 - DNA, 704 bp, Oryza sativa
aattcctgcagcccgctgtcgatttccccattgcgatgccgacattgttccatccatgcgtgtgctcagtgtattttttttctctgccttccaggttgcgggctccaattggcgtctctcccacacatcgcatcttcttttggggggagggaggggggcatctttgccttcgtcagctaatgctcgctaaggtatttagtacaagatcacattgttttatcactgggatagctgttgagttcattacatatgtgtggagctgtggtatatggataaactgagatgattatgtcagcgaatacctgtttgcttgatttcgcatatatggtgctcctctgtttttttcccttggattgctaattagctgtgctttggcatatatttacattatttcatttttctattgtcctgctatgttatatattctttcgtaggttggtttttttatcgcttatgtgggatacatgtttagttcatttcacatatgcgatgctgcgatatgtataacccgagatgcttttgtctccagtatagctgttcggtggatttcgtatatatggtgctcctcttttttccctccttcagttaccaattgctttgttttacattgttccgctatgatatatattcgctcctctttttttccctccttcaattactgattactttgttttacattgttccgctgtgatatatattcttgg

SEQ ID NO: 51922 - DNA, 653 bp, Oryza sativa
tcttttagtaataaacataataatagttttgcacaattgccttgggatgtttattaacaatgcatagaccttagtcaactttctggtatacccttcagtcagctgacagtgattatgtaaactgggcattatttacgggcactcgagctatcaggctttgcccgtccatggtgaagccatttttccattataatcattatcagctattacatactcgcctcccatataaatggaactttgaaacaaaatatggttgctctcatctttcactctttcataccacaatacatcctcgttctaatcatctgaagttttcagtacaggttctaggacatttcacatacagcttggtattaattagtatctaacttgaggattgctagcaaatggaagcacaataaatgtatgagcatctacgggcaaaagtgggatgcttgtgttctttaaaggaaagaagttgctgactgacagattgttcgcgacagcctcatccaggagctcttgtgtaaccttattagaagtattcgttgatcgctgtagctgacccctctcgttgtacataaatgtttttttgcgaacggggcagcccttttcgttcttgttgttcctatatagatgtagaacccatattatggtatcgtgtatttgctaca

SEQ ID NO: 51923 - DNA, 601 bp, Oryza sativa
atcaaattcccctcgctgaaattatttagcagcctagcaggctaatcaacaaaaagaaattatatatgtaccctgaattgctgctggtagctggtattcagccatgcctcaccaacgattatagcttctttctgtttttattcttagcacagaaggtgtgccgtcgtttgtgcacttcccttttctattgagccatgatattgactgtatttcttctgtctcataaaaaacaaatctaagatagaatatgactatcttaatactacaaatctaaacagctcctaaaactatgaatttgaatctgattgtctagattcgtaataatagaatatgttccatcatatctaggtttatttttaagagtacatttattaaattcccatgttttaggtgtaattgtgattttacccctacttaagtagactttacaattttacccttaattttctcgaactgaataatctgtttacccctggtttagatgtccagtcccacataaagtgagttcaagaaattagaaaattgactaagaaaatatgtaaatactctactaaccctcacctattcaaacaaatccactgcccccactctaaatcccctc

SEQ ID NO: 51924 - DNA, 860 bp, Oryza sativa
gagctgaaatacgcacctgtccgtacttgttccatccccagcagaagacctcgccttcatctgcataaatgtcaccacattttgtcagtagatgttagaccaggaacagcactttctacgggcatgtttaaacaaattgtcagggaggccaaagattaacaagaatttaagtacttcaatcacacatggaacagcttattgtagaattccaactttccaagcacaagttactgataatacgctaataactacagtgactcataatatgattacacatcagaatatctaggaagattcaatagggcttgcttatatggggattaggctcagtacgttcggttggcagacagattaaactaaaatactcatggctttctaagggatcgagtataatctctacctcttcaacaaaccctaaaggtcttgtttggataattgggtttattcaacaaacccttgccagaaatatttccttgatttaaatgagcatgagaagagcattttattaatatgcagttatattagacagataggatagcaaattccttctaggggaaaaatactagtacagtcaaaggtaccagttattattgcactatgacgagctccacaagaaacagctcgtgcattcttattctccaagcttgaggcatctaccagttttggtacagtctgcataaaaaaaaaagcaatatacttatggttatcacttactgagtaaacatgcacctcacatacagctaactccattttgggaggcaatcattatgttaactgtagttattttccctaaacttactttatgtaattaacctccattaacatcgaaaagaatagaattgagtaaagtgtacgggcgg

SEQ ID NO: 51925 - DNA, 1404 bp, Oryza sativa
atgaggcgtgtgcgtgtttcccccgatgtgcccggcacgacacctcgccccgcgtagagttgacacacgggagggcgcgtcgccgtcgcggatccagcaaaggaagatatggcgcgatccatcggcggcaagggcgggggaggcaacagacgaaaggcgtgccgcgatcgcgatgggacgccatgcgtttttttgtgcgatgggagatgaggacgacgggacaggttacggagcacgggagcagcggcgaatcgtgatccggctgcaatccaacgtcggtggcatactgacatcagaggaagggcggggaagcaacggccagtccagctccagggctccaatcgtgcatgatctgattgacgataggcgtatccgcataggatgcttgctgtttctgtgttctgccgactgacgtcgcatgcgtgaaatagccaaacagggaactatacttgcaacagaaagagaggtgcatgtagctgcgccacatctacctatttggaactcatcccttattactactcactactacaaaatctatttttcatggcatcactttatttttttttctttggcggttatacgcagaaaccgccagaaaaaaattaggggggggggctatgggccaccagcgaaaatgaatcttcgctagcagctcacttagataaccaccagcaattttcgccagcgggtgcttaggagcaccatctgagaaaataaattcgagatataaatcctatccacctctctccgcgctttcgtggcctctcccacccaacccaactttctccgcctctctcccacctttctcgatacctctggcctcccccctctctctccacctttctcgatcttcctccagcctccctcctctctccaccgccgtcggctgccgtcgctttcaccgccgccgcatccgtcctggggaaggcgagagcgaggaggacgaatccgctgcctctcgtggcctctccacccaacccaactttctccgctctcttccacctttctcgatacctccggcatccctcctctctccgcctccgggcctccctcctctctgcaccgccgtcggctgccgtcacttccaccgccgccggttgccttcacttccatcgtcgccacggcatccatcctcgggaacgcgagggcgaggaggagggatccgccgcggcctggctgtggggagcgtgcatccgccgccgtcaggccgcggggaggatggatccgctgccgccagcacgcggggagcacagagctgtcggcggtagctgcggggcctcgtcgtgtcgcggatctcatcgtcacggtcgccgccatcgggccgtggggagcgcggttccgccgcctccggccgtggggcctcgttgtcggttgcgtcgcagatctcgtcgtcatgaccgtcgc

SEQ ID NO: 51926 - DNA, 2066 bp, Oryza sativa
ggcggctggtatagtgtaccgcctatgaaaaatggatcgtgtggtattcaagtttcgcaggcggttagcttacgaaaaccgtcagagaaaatggatctacgctggcggtcagctaccgccggcaaaaatactgtattaccattggcctttagtcactggcggtgctgtcagccaccagcaaaatttcattttggcaaaaaaataatgatttttctagccgtgactgtatttaatttgttccaaaatggtacggcggtgattccaaatttatgatgtgtttagttcacgctaaaattgaaagtttgattgaaattggaacgatgtgacggaaaagttggaagtttatgtgtgtagaaaagttttgatttgatgaaaaagttaaaagtttaaagaaaaagttgggaactaaaccaggccttatagtctatagctatattttgagatgggtagctacgttaatagcttgtcaacaatatatgttagtgtagaatgtcagttagcacttggaagatttgtttataatcttcccagtttaacactatcaatcttccgcgcacagttgttgtgatgatggtcgaaacaagtcggtcgaacaaacgcattccacgtatgatgtaatatagtaactgtgctataaaatacagtcttttattctctctggagaaggtagcataaaattaagtttttctggagggtaacataaattccagttgtttgtggcgctcgctagtcgctatcacagaaataggcaatggctcgtcgagtcgttttccgtcttccatcctgtcttgtcctagaaaggccttcagtccttcacccttcaagccctgcttttgtttccaccaaagtctctaactgggccttcaccaaatactttcgcgaacattgtactacgatggggctatttttctgggtccaccaaagaggaaaatctattgtgtggcctgcgcactacaaaaagggcttgggacacccatgatctgactgggccgggagatctgccttggatctgactgtttgagagtctcttctttctttcgctaaaaaaaggtctcacctttcttagtctcccctgcaagagatgtcatgaccaatatgcaatgaacatactcgagagtaacgcatagtctaatatgattgcaatcaacgatgcactgtattattagagcaagttttatggaggggtgcttgctagcctttagttttgttcacatcatcaactaattaattaagcgatagtatataaaatacattacctctaatacactagctccagtataatataattttttatttgcatccaatttacactggtctctcgagtctcaattttctcccttagagtttgttaagaggttaccttttgtatgaggagtggccttttctcttttttctttgtcctctccttcaattcacctcataatttagtcttagtatatggcatcatgggatctggcttaggtgtccttaatacttaggtggtgtttagtccctcccacccaaacaccaccttactcttatactggcataatgctcgccaggttctgaatgtggtctccaatagatatcttttataataaagtagaataacaccaaagttgaatgtaccttttttggagcgtgtatgtgataagcatatgcttttgtattgtgtttctcaaataataaaataaaataaagcagagtgacgtacattagattggtaaaaccaaacaaacaagtctaacgcgatcgcaattggtttcgtttgctcatgtcaatctatgggtttatgattacgggcatgtttagactattgccaaaacaactttttcataatttagcatacccaaattttttataagagacaacatcgccatgttttgatagggtaaagttaatttggatatgtttagtttggtgcccccatataggataccaaatgttggcaatattcaaaggataccggattttggtatgttactatggtattgccaaattcctgtagtcattgctatttgctaatgtttcttaacaaaccgacctatgttttgtattccactttaaaaaaaatagcatggtttaaa

SEQ ID NO: 51927 - DNA, 2400 bp, Oryza sativa
cattgttttttatataaggtgaaacaacacccgatttaaacgattgaaacattttcgatctacttagtgaaacaattccaaaatacttggtggaacatcgtgcaacatttaaaaataattcaataataagctaaaaaagtttcgccggaatatatctatgtgtgatcttgttttaaagatttaattataacgaatttaatggtgcaatcggattatgatttggacaaataatttaagagaaaaaaatagtttaaagtggttttgcacgtatgcgtcatgctgacgtcaacgtccgatttcccccctccctgtcgggagcccgacgcggagtcgtcttctccacttcatttatcaaatggagctgattttggataggcatgggatatgccggtccaaattttaggtgttagggtgtgcttttagagcaattttaataataatattgccaatcactagttttaaaaattgaaacattatttataaccaatctaatagctcatttatataatagttaattatagatatatactgcatcattaatacctaatatattaatgattaatactgtgtgtaacaagaactctcttccttttaatatattgacgtacaatctttttacgtgccttttatctctcccttcacataagcacaaatataatgtggtacttcctccgttccacagtataaaaccttctaacattatccaaattcatataaatgttaatgaatctagacacatatataaaatatatatattgatcaatggatgaatctagataagtccaaaaagtcttacgatataaaatggagggagtgacttggacaatctgtttacgtcatcttattatactcactcttatatggataagtatataaatgtgtatatgcgtaaatatgtttattgtgtttctaataaaattactaccacattgtttcgattttgaaggggtgggtaggagagaggggaaaaagtttcctcctaaaaaaactagaaagaggaggttgagtcgagggaccgatcgaatatgtttagttccacgctacaattaaaagtttgactaaaattgaaaatttgaagaaaaaaattataagtttatgtgtgtagaaaattttgatgtgataaaaaagttagaagtttgaaaaaaaagttaaaaagggtaccgcatagtgccagatagtacagtagccaccaaaaagcccacatatccgactaggagtacgtttttacttgcttcccccatcggtctccctctggcgcgccgctttggcttttccgaaaggaagccagtcatccatctcccccgatttaacccgacgccgtgccgctagtctgatccgccaccgccacggtctcctcctcgcccccgtgcctccgcctcctcctcctcccgtccagcccgtatcgacgagaccagcaaggcgccgccgcgcgcggagctcttgacgcccgccgacgacccgcccgccgtcagatccgcctgctgcatgcttcctccaggtttagatcgtttccaaaaatcctctgcttctcttcagtaattccacccgcgtacggggtttctcgatcagagcgggggttccgtttatgatcgggtcagggtttacctattccttgtgatttgggcggcatgcgatttttggattataggtgacgtttggaggatatgtaatattatgggttttcaggaaatcgtttggatgctgtagttaccaaccaccgcagcatgcctagcaatttgtgcaattactcgttactcttaacagcactcacgctgtcacgcgcggtgtggcacactgtcaaaatttgagatacgttgacacttcatcattggtggaatctcgtgaaggaattatttcagcggatgtgcatatgctatagtatgagaacatctatggtattatgtagatacaacaatcactaaccagtcacgagaagaaggtttttagttgtgattctataatatatttgagaatcaaaactaactttacaagcttatgtgggtttgacccttcaaaatttcttggagttttttatagttcaacaagcgtcaatgattgcgattcatatatatacattgtttactagtaatggtttgtgtgagttcttgagacaaaaatatgtggttgaccacgcaccaaatgcattgttccaccactgcttttggttgtgatcattttcgcatagatagcgtcatgtcatgctgcattttgatggtgatgttgtgattcgtgaatgcaagcaaaataaacgcaatggaaacattttttttgcaagtcatattttttgtttgtttctagttctcatcgttatcttcttttaataaatgtgtccctttgttctcttagagcattttcccctctcagaaaattggaaacatttaataagcatcagagtgatca

SEQ ID NO: 51928 - DNA, 944 bp, Oryza sativa
  unsure (1)..(944): unsure at all n locations
atgagtttctgcactctttgttggacaaattttagaattacattctttgctcgacggagggtgagttcaagtacattggcaaaaaaaatgattttttttcttctttcctctctatagctatgagttttgtatattaccaattgtctctcttcaccaaattgccagtgtgtttttctcttttatacattggcaattcatttatttcttttctcaagcaaattcatttttcttaatcttttctacattgtcattcatccaaattttgtctcttttgttacttctaaacaaagttgagtttgaactttgatttggtgtgaatgtattttacgcctacaactatttctagtaattttttttcatgaatttagagaacttttaaatccggttttcacgggtattcacatatttgatgttttttcagtgggtattccccattatcaattcaagagacttgtttatcttttgtgacggttgttatcccaatcaaaattttaaaacttccgcatatttttttcctcctaatcagtggttggggcacttagcataatctgacgacaatagatatgctagaagcctagaatcaatgtgccacacagctccgcctaacagatgctccctatggtcacttttacatagcttttaggacataaaattagtgagtgatttaatatgattttgttgtctcaaactttaaatatattgacatgagggagtaggagcatgtggtagatggtgatgctactcaacgtgcaatagtctagctaaaccaaaatgcaacagaaaggagcctcattgaagaaatggctacgaagttattctactannnnnnnnnnnnnnnnnnnnnggatcctctgccgtagatacagtagccataagcccataactgataggttaattcgatccataccattacaaatagggaaaagtctaaattaccccataaa

SEQ ID NO: 51929 - DNA, 735 bp, Oryza sativa
taaagaagacaccatttaggagacttggaaagcgtgcgaaaaaaatccaaaatatggaatcgggaaaaaaagagagggccttaaactccctttatcacccttgtcgtactaagagttctattgatattcgtcaatattgcactcacatttataacataatgattcctttcacctgtacggataaatagtacaaaatccaaatacgacataacacaaatacattataattattatgtaatcaactctcggtttcaacttaaacagagctaattagtgttgagaaaaacacaacccatggtgcttaattattctctcgctgcatcacctttaattttatttttatgttattaacaaaattaatcatcttcatatatgatttgatatgtggcaaagcggtagcgctacagcggttgtgatcaccttagatgtcttagacactacgctttgtcacacgtgcgaaaggccaaggtgcagacgtgcgttgtgcagcaggcaaaaagagaatttcggacgctttatttattagcaaacaatagatccaatgattataataatatgtccaccagttctactgtaagtgtaaattagttaatatagattttaaattgttaatataatggatacacaatataatggtgtagaccttattttgaaacagtgcattacctgagaataatagaccaatgtaaaaaagtagatccgataatttatataatggggccatcagtttaagtg

SEQ ID NO: 51930 - DNA, 1567 bp, Oryza sativa
aattttatgggaaactataaacaaaatagaaaaatagcgtcaagtaaataacaagtcataattgatcccattggatagatcctacctccaccatcacctcagctgaaactagtcggtgttaatcacttaatctccctgtgtacttaaagtcatacccttagcagttaaacacttactgaaccaggacttaacaggagtgccacgtaaacacttactgaaccaggactccacaggagtaccattaattagttgctggtatcaatttctgcaggaatgccccgcaacacaaacacaagcgatgggtaacgattctcgccatgtttgtagagcatacggacatccatatcatggctcaaaagataaggaaatagcacaatcatactatgcctgtggcacgcctttggtgctatggaaaaaaatagtattcctgaacaaagctagaattgacctgtttctcacagagaaaaaatgttgcaagaaatctttcgtgaataaggtgcaaatcaaagcaaaaggcatggctgaatacctactaccaacaataattcagggtgactatcaaatgtctgttagcctgctaagtaatttgactaatttcagtgaggaacatgagtatcaaactaacgcctcggtacaagaaaaaatgatgatgccaaaggacaaatagacaaacaagtagcatgggataaatgatgccagaggcgaagcatacaaatgacatgatccagtattattcagaggagcgctaatacgaattctaagggaacatgatgctgctgatcaagcaggttcattacattgaataggagctcaagagactcaaacaccatacattagataagctaaattcgtgaaaaaataatgttcagtgagagtgactggcactaacgtaagctgactgcatctaaatttcgccgtcccagagctcctcatgggtcttataaacgctgtggggattaacaatgacgtcgcccctgagaagcctaacctgaacatcataaaacaagaacatcagaaataactggtgcactgttatgagttagtagaaggggttcaagataatgagatacttgattgatgccttgatggcaaataaaatagctcatggcataagatgtacaaaattgtcctgataaggccagtggttgcgacataaaaaccaaacaagatcacgtgacaatagatgaatataattatagcacatgtaatgagaaatgagacaggcaacataataaccagagatcaaaggtgaataatagcattgctgagatattacaaattacaatagccttgaacctacatatccatttcattatactgtgtgttgttatattattattattttagataatgggaatttataaaacccggtttctacaccaacgggggtgtatacaaccacaaagtgtgatgttatattcttgacctatataatggatgtttgttgctgcgcacgtgcttccctgaacaggtctaataagggataaaataatgtttctatgagtatcctggtattgacgttccaaaccaagtactccctatgtcccaaaatataagggattttggg

SEQ ID NO: 51931 - DNA, 817 bp, Oryza sativa
acataggttgccatcgtggacagatcccatatagacaactttggaacacaaaagacagcaacataacgcgaaaacaacatagcgggagctaacggcggaaggcgacttaacgactaagcgctaggctaagcgcctaagcgactaacttatttcataggcacggttttggaactaggctcggaaccctaaaaatcttcatagttgacgtgctcctgaagatactcctcggcggaggggtcatctcctccatcttagtcaaatgcttcgtgtcgaggagaaagagtagagagggaaatatgaagagaaagagaggaggggaaatagtcgctgacatgtggggcccatgtgagtcccatgttgattcaactgctacgttggataaaatcggggtcaaaaccatctaaggatctaaagtaattccttttttaagttgagagatattacatagtttggtttttcggttgagcgacgattttgtaattcaacgacaagacaaaggacttttagtgtactttttccactgtctaattacgcccagcaaagcccaacccaaacaaacggcagtcctgcatcaggtaacaggagaattttttcttcagaggcaaatcaatcacagtgaccgagatagcacttgcatatgcgtacctctctgcatacagaacctatcaccaaatttatacagttacacgcacagtattgttttacaaattcgtttttctcaagatacaaagcgtttcgcccttcgacgcacaaatcttccctttggagacctgcacctcgttacagagcataaacagctaaaaaaaaaaagtaaagg

SEQ ID NO: 51932 - DNA, 572 bp, Oryza sativa
aggcggcggcagcgaaggtgggggcgaggcattggcagtaggagaagcaggcggcgtggaggcggcaggggtggggatcagggaggggtcgaagagaggttggcgttgggggagacggcgacggaaggggagccggtggagaggagcggcgaggaggaggaggaggcggtggaggagaagaagagcaggcgcggggaggagtcggaccagtggtagccgacgaggaaggcggcggcgcaggcgaaggcgagggccgcagcgcggaggacgcgcgggccgcagagcaggtcggcgccgtgcgcgcccaggggcttcatgctcgcctcgcctcgcctcgcgtcgcgtcgcgtcgcggtgcggagagcggtcggcgcggcggtgccttgccgatgcgggagggatgggatcgtgcactgccggggactgaactgaactgaggggcactgctctgttatttttcacttgaaaaatctatccccttcttggagtactactgtataataataattcttccaagtgggtcctctttgtcagtggacgcccgggacaccggcgaattgaagtcggctttg

SEQ ID NO: 51933 - DNA, 560 bp, Oryza sativa
tacctcccctggtcctcatagggctctccgcgtagtggagcagcagccgtagccagccccgtcgtcgtcgtacgcccatggcagagcactatcgttgctccgtcgctgatggtcagataggggatggagaaggggcacgcgtcgagaggatagcggcgaccaacggatgatccagcgcacaggaaaaccaggacggagcaaggtcacggcaccgatgccgcgatgggcctatgagcactaaaaggctgccgtgcattgggccaaaaaatcagctggcccatatgtcacgtcccaaaacgactctaaaatatatcccttaaatgatgcctagaataattaaaatccgtgtgaaagcctccaacaattaaaatgtgtaaagttaaaagccaaataaggcttagaggatttttgtaaatctcctaaaagcctaaaatgcgtaaataaattttagtggaattttcagacgcaaataataattattaagaaataaacaaagttaaaatgattttataaaaagaaaaaccctaaaagtcccccttccctcccttgggccggcccgg

SEQ ID NO: 51934 - DNA, 597 bp, Oryza sativa
ttgataattgctactactgcgacaatctcgcggttcgtttgcgaagaaatataaagagggtgccttgctgtggctgtgcacttctctctccttctttgttttcacccgaaagttgtgattttggtgtggggttttgatgtagagaaattgatgagtaccacgggtattgccagccaaatattaattgcggaatgtggggaatggggaaagggtgttgccttcgacgtggattcgcctgctgcgacacataagcatgcatatattcgtagagtggagcggaattctgctagcattctgtagttacccagttacgttaactactgtagtgctaatgttagagttaaatgatttatatgatgaagtgatgaagtatacttttggcctgccgacttcgtctggggtttaatttacacaaaacttcaataccttgtaaactacacacccaaatatcatgcatgcaaatcacatcctaggggtggtattgcgggtgttttggttgatgtggcatgcaggtgaacgtgggggcctgatgatttagggaaagaaaattatgtgggcctttttctctttcctagatggggtgtgagtatgggtggg

SEQ ID NO: 51935 - DNA, 553 bp, Oryza sativa
cagtttttaagaatgcaatatcatctaaagctggttattgaatggagtaaatgcttatatgtaatatgttggtagctcgaacatcctggaccattggaccatcgtgattttaaacaccgtacgaaaaaaaaacaaaaggcataagggagagggcgtgtttagtacacgctaaaattggaagtttgattgaaattgaaatgatatgatggaaaatttggaaatttgtgtgtgtatgaaagttttgatgtggtagaaaagttgaaagtttgaagaaaaaattgagaactaaaccaggcctatatacggacacacatgtacacactcatctctataaacatgcacacacgttctacgcatatgagcatctctaaaaattggaccaacatatttaaaaaatgattgaaattaacagagttacctctcatccctatagacgcacgtacgtacaccttaccttacccgtacaggaagacggttgggatatcttaaggctgaagaagtaaccatacctgtctctctactgatgtatacatgaacattcgtgctaagccta

SEQ ID NO: 51936 - DNA, 582 bp, Oryza sativa
tgttacaccatgtagtatccaattcttacttaggatggttttttttggatggagggggtagtggaagtagacgagctactatgtatctagctagggaaaaagaaggaataagttaggggacgaaagatgtagaaggcaacgacaacgatgtggttggtcggaagaagtgaggaggggtaaggattagaattataaagggtagcacagatcttggagtaatctcaaccgttaaaacaagtggctacattttttaagaaaatcaggtgatcaataaacaacaagaagccccttagaatccagtatgagaatttactatttatcattcttccaaatatacatgtctaaataacactctcttaaaattttattctcatttaccatcgactcgagtggcgaatgagaatgaaaatagtaaattcggcattgcaaggaatgccaatggacgggtggagtcattattttcagctgctgcccagcctacggttccagcttccaacagctcgagaagagtgaagagatggcaacacagacacaggaaacggtcgcgcgcgccacagcgacagcgatagagccgctccgcgt

SEQ ID NO: 51937 - DNA, 924 bp, Oryza sativa
ggcgtatgaattttgcattagtaacatgggtgataataacagaagaaaggcacaaaaaaaagtatttggaaacttctactccttcatttttatatttggcaaagaagattcatccattttatatatatggacagtgaactattagtactttagaagggagtacctatacatctttcgaaagatttttataatcgtatcacacagatttttaatctttggattaaaatccgatagatataataaaaagcaaaaagcaattaagaaacactataatggacactaaattaccatatcctcaagaaaaagaccaaatccaatacaaaatttaaaatttacatgcgaagattcaaaaattacagtgtaacttacaaaagttacagtgtaagtttcataaattacactataacttacaagaaaatgcactgtaaatttgagtgagaaaatcgagtgagagataagaaaaaatctttcgagtgagatatagcaaaatcgctttagaaaggttgatgacaccttcacaaaaaagaaggaagaaagtaggggcagatccgctctacttttagggcatgtataatccgcactactcaaaactaagtagcacttacccttcttgcttactaccacgtgctttacacctggtccaatattatctcgtttcaagacaagtaatataacaaacaattaacaaacacattttgggttttcaggtagggttggctctgaagaagctatttgaagagggtgtggtcaaacgcgaagatctgtttatcacgtctaagctatggtaacctcaaatttatgtgtgattggcctgtaattatgtctttgcagttgaattggaattccagtgcttgcttggagctttacttcaactgatcagaggtgatgggtatgtttgtcaggtgtgatcatcatgccccagag

SEQ ID NO: 51938 - DNA, 668 bp, Oryza sativa
aaaatatggcgccataaatatagctacacccctgaaaaattgatatgcacgctgttctctctcgttctctctcaattgaaactaaaataaaaataaaatacaaaattacagtcctatataactaaaattacatttgtaaattcagttgatatgacatgtaagtgcactgtaattttgataacaatgttgtgtaagtaaatatttatttgttatttttttaatatataaaattacaatcctatataactaaaattacatttgtaaattcagttgatatggcatgtaagtgcattgtaattttgataaaagtattgtgtaactaaatatgcatttttattttcttttgtagtccgttggatgtaaatttaagggtagaacaaatctgggtgatttttttttagaaatcacccgacaaatagatagacaatccccatactcaaagaaatacttatgattttattgatacactaatttcagttttttttaaccaaagggctttactaaattcaattctatttgacttgtactagtatgtgcatcgtttcttttatgttcagctatcatgtaccatccacgtcaaattgtagacctcaaagactcaaacgtccttgtagtaaaaggaacgaatacgatgagcttgtaaacattataattcagatgccagatgg

SEQ ID NO: 51939 - DNA, 584 bp, Oryza sativa
tgcgtgcatgattccttgtcccaggaggcaaggtacgccaaaagttgatacaattcagagtttaacaagcggaagcgtaattaattaatttattacatgggcgacgaagacccagcacacaagaagacaaacgaaaaacagcggaagactagggcgacgaccacaagcgcttgacggcaggcacgagctagacaccaaagccttcattatccaggggctcctcttctgggtttgggaaaaattgagcaagactgagtacaaccaccgtactcaacaagacacacccacaagtgcagaataaatgcaagggagtacaagggagccataatatagggggttagggtttgcagtaaacagcattaaaagtcacttagttgcttaaagctactttgtaaacacggtcctagagctatacaatattattaactaaggccgtgaacccacacgaacctgccttaacccaagcgctacgatgattcagaccgaactggcaacccgaccctgggtcccagcttgtcccaagccaacccaggccaaccattccacattttagctgttaggcaggttttaagaattaaaacact

SEQ ID NO: 51940 - DNA, 624 bp, Oryza sativa
ggcagcgggggtgtcactgacacggcagggaggagggccggcgagcaggcgcagctggtggctggcgggggaagagcgcggtggtggctcccagccgaccgactctcgagctcctgattcacgggctcagcgacgccgccgccgcagagctcatctacgccggcagccactcttccccaatgccgcgctgtcgccgcacagccttcgagcttcctccactctctctctctctctccactgtcaccgccgccagcattcttgggagccacccgccgccgaccgcactcgaatctccagtgccaccgcatcttgggccacctccgtcgccgtcgaggtcgcccatagccattggagtcgtgcgccctcctctggccttcctccctgtgcgcaggaaagagaggaagaagagagaaagagggatctaacatgcgggtcctaccttttattattttattatttccccagaaactgccacgtaagccccacgtcaatctcacgtgggatgaagaactagtaaaagaagctacgtaggtgtcacgtcaatcaaaactggggacaataccaccggaggacctcatttgcactgtttttgaaagttgatggatgagttgtaactgggttttt

SEQ ID NO: 51941 - DNA, 686 bp, Oryza sativa
actcaggcacatcctctggggcatgacaatcacacctgacaaacatacccatcagcaccaatcagtttaagtaaaagctcaagcaggcactaggtaatccaattcaactgcaaagacaagacatatttacaggacaatcacgcaaaaggttaccatagcttagatgtgataaataattcttcacgcttgacaacaccttcttcaaatagcttcttcagagctatccccacctgaaaacccaaaatgcgtttattaattattactcgtcttgaaacaagataaaattggggtctagtgtaaagcatatagtagtaagaaagacaggtaagtgctagttttgagttctgattgccagcgcatggccctgagtagtgcagatttgtcttttactatgtaaactttttttcttttttctttttttgagaaggtggaagatcatcaacttattatctaaacgagtagttcactatcagtccatataaaatggaggaatatcatacaagtttccataacagtaggttgcccaattgaatcaagaacggaaatcatctgttttgtgccgctgatctgttttcactaatgctgttaatgcaaaattgatacacgaatcgtttcaaacaaaaacatagacgagaactaggaggaccatgcctacagaattctgcagtgataccccagtaatgcgg

SEQ ID NO: 51942 - DNA, 735 bp, Oryza sativa
agtattccttgaactttataccattgaactctacttggacgtataaatatttttatggattgtttgattcgactccaaaacttgccctaccgaatcattgataactacaaaggtaataactcttatgtatttggattgcaaccaaacatgtgccaaataaatatagtcgaggaatcttatcctacaaaaacgagagtaccgattcctgcctcgtgcaagaaatttgaacattccaacagggataatggcgccgcacacataaaatcttctcatgaatcaattctggttgaaacgaaccgctgctacaatagaaaaaaaagaagattatggtttactaaaggcatgcaatgatgattagtactttgtgtctgatggatcattgtcatgatttatttcgaagcaaacgaattagctctgccgccatgagtagtactactatcaggtactgttaatagtggcattgtccaatttctgcactgaaaacaacccataaaaggttagacagcgccactgatacacacttagaagtcaagattggatcttgcctgccagaaaaacacggcggttagggggcaaagaaatcagaattaacccccaaaaaaaatgtcaaactaggcagcatgcctaactagacacggtcgcctgcacggattcactttaatgatgatcaaaatctctctgcaaatcttcagagatcgatcgagacataataaaaacacaggtggtgcatgtttc

SEQ ID NO: 51943 - DNA, 861 bp, Oryza sativa
ggtcaaaaacaagcatcgcacggtgatgacgggaaacggcggcaggtttctttggacgataggttgccggcacaccgcgatgtacttcttctgtcttaaaaaagacaatttttatacacgtattcagagaaacaagtggtaggagagtagcgtggcaaagcacagcgaaatattaaagctagcgagagctcaaaacaaacgtttctgttcgaagtcacagttgtacgcacatgttttaatttagcacggatgaggggagtccctttaacatgtcttgatcatctcggcatcttctgctacatggtggacaatagtgtcgttgtccatgggtcacaagggtcatatgtatgtgatatgtcccccataaaaggaaaattgaaggaatggtggaatttggttatattacgggtctcatggttatcgatattacctaataagtccaaacggcttattcagaataaaaactaatatataggtaaaacttttatatatttgttcgtatcgatttaaaaaagccaaaaaaatatgctaaaaatatcttaaaattaactcaaaaatttaagttaaaaaaatggtttttcctttgacttattaggccaaccgacgggactctaggcttaatagaaattatagaaattataggtttgtttgactgtacttcctatggctctgttcgtatgtcaaggttctcaactcctacttctcgtttttcgcgcgcacgtttttcaaactgttaaacggtgtattttttgtaaaaaaaattatatacaaaagttgcttaaaaatcatattgatctattttcttttaaaaaaataattaattaatcacatactaatagactgctatgttttccgtgccgg

SEQ ID NO: 51944 - DNA, 718 bp, Oryza sativa
ctgaatcacatgtattagtgaacacgaggacgaggtcaggtacacgatcgcctgcattaccttgcacgatcacgaaagcccccaaattagcccagatccagtagtattttgcattttgattgattgatttataccgaatcaaagaacatcaacaccagcctactgcaacttgccctgatcctaatgatgtgcacgatggacaacaagatatactatatctgttacttctctgacactatataggagtattagactatttgttataatataagtcactgggaacggaagcaatcggaaagaaatcttacgtccagccacgtcttattctgtcacctaaatctccaatgacaacttagtagagaggacatatggatgtgttccttttgatttctgtttgatctttgctaacaagtcaagctttcgtgtactcctaataaattaactcatagtatattacgatgaccaccattccaaactaactgttttcaattaaactttttaaaagttattcaaaatacattgatttatatagtggtactatacaatgtagctgtagcctccacttctgatccaaacaaacccttaattgacaaacctaggtacttacatgtaattatactaacttcaatcccgtaaatcaattagtcacaaagtctaatcttttcctctaaataatttgcagcaagttacagcaaattttactttctatttagaaaag

SEQ ID NO: 51945 - DNA, 579 bp, Oryza sativa
ctactacaagagcaatagtcttcctccttgcaacaacctattcacacaaaagaaatgtatgcagcatggattagaacttcgtgaagcctcttttcgtatttacatggaatggttcaaataatagtttgcagttcatggcttcatgcatgcccatgtaatacagtcatgtagacggtatataatcaagtcatgatttatgctcgattttttaaacgaagatgacctaaaaaatataatgggttaatatacctttactgacttgattagacttgttggaagagagtcccaggagacagtttcagtaactcttcgtttaacagtcggcgtagaagtaactgtaccggaagtaccattaggctttgctgccaaattgagctttggtggtgaagtcattgcaggcggtggtggtgttggtgttggtgttggtggtgaagtcttataaagctttggtggtgagtttttttcagatgcagactcctttttgctgtcctttgacatttgcttcttcactacagctgagccattctgactgggtgaagaagcgctagtcttgcgtgtgtccttgttaatttcttgttt

SEQ ID NO: 51946 - DNA, 555 bp, Oryza sativa
cccatgcctcaattccttagggagaggctgtgagaaatgcactgcctaattcatggaagaagacaccatcctatatgggtttcttcatttcttgacttaatggctactaggaaaggagagacctaacaagccaagaaacggcaattcttgggagggatgagcattttggtcagaatacaactcctaaatctacaacgcccaacatttgtagaggggctcttaaaccaacttctgttagttatttggcacagaaacgatatttaatgtctcatacagtcacttgcacgaaaatttccatgagaaaaaaattctccagcaaaattgtccttgtcggaggtctttggtctccaaactaagtgaaggcgttgattgacatagtaccttgaggttaccaagaaggaaagcaatcctagtacgcgaaacaagaaaccgaaaaaaaagcaaaggactaagttacacctccttgttgaggaaagaatttcttaaccgaaggattatcccagaaaagaaaaattacgaaagcaagacgcaagagaacttaaaataatctatcca

SEQ ID NO: 51947 - DNA, 713 bp, Oryza sativa
aaaaaaacatggtaaattatgatgctgacaagctagctagctactacaaacaaaataatattgtcaaagtcttgagcatgcacattctgaacttaatttctgataagatgttcacgtgaaatgagtagatcgagtgagtatgtacataccaatggggtcatgaggcggcagaggagtgatctgaagatgccctggttgggcctctcgtagaagagctgggagaagcgagtggagtagaagaggaagaagggcaagccccagattgagtaggatggcaccacccaatgcagggtcctcaccagcatcgtgcacggctgccctccctcacctgcaaccaaaccaatcaatcagaactgaacaagcttgaaattaaaggattaataattcttcagaattaatgacagatagtttttgttgctgcatgatcaacttggaattaattactaacttgatggccaaacaaaaggaattaatatactaagctagcactttgatatggtcaagtacacagtcaaaatgttggagtgatcatctctgcgcagtttcagagtagaaaaaagagattgacaagtggaacgcgtagctagcatataaaacacttcagcttgaaaagtcagagcatatatgcgtatgtgttgtgtttagcgtactttgaacctgtatagagcaagaggaggcttggctacatgtggcataaaaagaaataaaattct

SEQ ID NO: 51948 - DNA, 589 bp, Oryza sativa
cttccaaaaacttttttgctctggtattccaaagacaagggacggaagacattgaaacaatctctagtctctacctttacatctcccttgtaaattctaattcatatttcgtagcatcacaaatatacaagctcaatagttttcaggaaactacgttcagagtttaaacgctgttggaccttggaggaagtacccgctaagacataagtctgattattggcctaaaataaggttgtattattagcatatgtgatgtagtatatacagacatacagttcgtagttctggtgattttgcagaagctttcaacgcttcgctgccaaatggccacttcaaccatgcactcttttaatctaatgctctcactgtttccaattttcagtgttggcgtggtggattatttgaatttcctcctaggatcttctattactctcatagtagtaccactgctagaaaatgttttcttaaagaaaaaggtactttcagaatgctacatgttttggatagccatatttccacaacctgactgacgtctgtggttactgattacctaaccagataatcaaatccatgtgcctgcattactcaa

SEQ ID NO: 51949 - DNA, 564 bp, Oryza sativa
gtctactccgcgcccggccatgacgccgaccgaggaggacgagccatggtaaggtacagcgacaccaacgccgccgccgccgcctcccgcgaggtctccttctcgcgcgacaaccacgaccagctctacgtctccgcggcgcggcgtgacccgcccagcttcggctacgacatcagcgtcgcgtccttcagcggccagagccggtacgaggacgccgtcggcgactacgacgacgacgacgacgagatcgacgtgagggtcgggaagcccgtcggcgtcgcggggcttttcaagtactcgacggccatggacatcgtcctcctcgtgctcgggtgcgtcggcgccatgatcaacggcggctcgctgccatggtactcctacctgttcggtaacttcgtcaacaagatcgtcaacgtcgacaagacgcagatgatgaaggacgtcaagcaggtctcgccgcgtgcatcgccatgatcatttcttcgatttttcagcttcgattcaaaaccgatcttttcatcttcgtttcttgttcgatgccagattagtgtgggctgcaggaat

SEQ ID NO: 51950 - DNA, 578 bp, Oryza sativa
ggattgattttgataagagttgctgaatttagctagtttttgcggttgatttcgttgggctccaagttgccaaatgctgcttacgcatcgctctaggtggtttttcgttggatcaaactggtattttggtggttagattcggggcgtgtgagtggtcaccatttttggactaacgaggtctccccaattcagtaatttatgttcttactgcttagtgttactgttacgttcgattgacttcttcatggaaggactgtacaagctcgatcaatatcgttcggatgtggcttgagtgtgaaaactaatgccttgtgtcttttttagcttagtagtagatgtctctggatgcatgcgttggtggataatagtttgatggggtcatctccgcgttggatagcaattaaggttactgttttttttttggctattcttctgtcagttctgttgattacaacagtttttagctattttgcttgagtcatcgtctgttgacagtgatgacagtaatgtggttctcttgcaacgatgatgaacttataatgggcactctttttctttctcaaagattgttccatgat

SEQ ID NO: 51951 - DNA, 720 bp, Oryza sativa
cagcacatcgaaatacacctacagctagctggagggactaagctttcccaatcaaaacaaaacagaactaatatgagatgatgggtttgggaaggggatcaatacctggttggcgagggagagggagtggtactgcatgcgcgggctgcgcccaatgtctcccagaactaccaccgccgctcgcttcctcctccctgcctctagtgccacggccattgcctactagccttccgagtttggaaatttcagattcaaccgccaccaagaagtgaggttcctgaaaaggcatttaatttagctaggtattagctccaaacatccaggaagggaggagtagataaaaaatggacaacggttctcttggttatttttctgttcaccgcatttatgctcaattagagaatacgtctgtactattttacatcaatacaacaatgttctgttgacggaacaagaatgtagggatgcaatatatgctagtgagtttatactcatgtaaattaattcgttgtttcgcatattgttgaacgcaactggagattcattagtttgtacgaatgattggcaaccaacactcggatagtatcggtactgtgtattccacagttctacaagtagcaaaggggactagtcctaatcatcagcaatcgcttaggaacatacatgaatttcattgtcctaaagtcaagtcaggttgttctgacattgatctggatgggc

SEQ ID NO: 51952 - DNA, 1252 bp, Oryza sativa
tgatggattattgattggtcccgtacgtcaagttgggcagagaaaattagcgagcaatacacactgtctagcgcatggggcactttcaggagtaaggctaactgctacaattaagtgttaacaatgcaggagtatgtatgattgtttggtattagcatctgttgccggcaatggtcactagcaataatatcaatatagcagaacaactatgagtagttttgctcaactgattaggtttttttgggtaaaacgtatccaactataggaaactatttcaatccctcgagggatgccctctcatttgtctaaaaaccattcaaaccgttataaaaatttcttgaaaaatatgacaacacttatacaacatatatatatcactccacaaaattttaactcaaaactcaactcacacatcaatatataataaggacaaattcagcgcacgaataatattcacgtccgaatttgtcttttttgcctcaatgtgtaggtcgaattttaacttgatttttagtggagcggtaaatatcactatgctctatattatcattattttttcaaaaaaaaaatacaactatttatattgaatttgaaagcaaaatttatgcaacagaacatccactcgagttattagaatccattccccattcaattgggcttaagttatagatttggaatgaggctcacatttaatatttgctataaaattcagtagctatcaagtactgtacgttttacctatcaatgtcttggaggtctctagtgctggctcaatctcttgagatgtgcgtttgtgcgctttacggtccttcaagcaaaatttatactatactataaaagtcggtatctatcaagaacggtaaattcacctttttcttttcgcgtacactaaaagaaaaaagttagtttaaactcacctttttcagaaacatatagtatctcagacctttaaactatgtttatttacttattactactatgttgttttaaaggaaaatccacaaagctcattcgtattttctttgcggggcattcatatgactatatgagaaaccgatcatacattcatacctagcagcagaagaattatagtgctctataaatcatagaacaaatcaccaagcgtaacgcagatctatttcacacgagtgctctataaatcgtggatcaaattaccatgtgtaaagcagaatttctcaggaagtgctatgtaaaggttgtgtttagttcctgaaaaaagttgaaagtttgg

SEQ ID NO: 51953 - DNA, 1720 bp, Oryza sativa
tagccttctggtaatttacataggcgctaatctttagttgtaaactagagcatatcatagtgttgacaccgttaacacttaacacatagataccaatctaagtgtaaaatattaatcttagaacatacgtagtagatactaaactttaggtgtaaattagcacttggcaaactggttttcccaaaggagcaatcaaagcggtgtgacatataaactgattagtaaccggtggtgtgacaagcaaagatgtttcagcaataataacatagctaaagcatgtataccttgcagtactttttgggcaaaagaagccagttctattactgaagtacactcttcgatttaactgttctattactgaggtactcttcgattttgtggttgactgtaacggtaatgctaatacttgacataattaggtagagctctgaggagctacatgagatgtcaatactttgctcttatgcccaccatttcacccgcggcaacgcgcgggtcccggctagtttctctagttttcctttgccttaaaggagccctagatcttgtttgggatggttcaaattactgccaattcccgaggatgtgcaaaatcctgaccgaactggcgttatgtagatttattggtgattttttgaggattaatcatctcaacttctcgagtcagcgaaggcctcccacatgattttagattttcaatgacaataactatatcttgattgaattttaaacataattagtaccatcaagtactgactccccttagtaaataaatatttatatttctaactccaccgctgttcttatgtgtggctttgactgtttgagctacagataatgagcccaaaaaaaaaactaatagaggagcacctctaaaaaaagtctttatattctgtgaccgagcaataaccgaagcaactctatatacttcatgagtacaacttttgtatttatattaccagcggctttaaagttaatataaaaaactcaaaaagtatcacctgtatttttttaaacaacccatacaagatagtatgatatttttatttatatagcagaaaaaaaatacaagacctgggaaactatatttatggaaaaaaatactacaccccacatatacgtctgatcctgctactgaaaacaaaataacatcccataggaaatgtaacaacataacaattatgcctgacaagcttgagacgctaattaacctacaccccccccctcctcaaacaaaaaccgaagcaaaggccagattatccactccaacgaagaaaaatatgtcaaatattaggccttgcttagttcctaaattttttttctcaaaaatatcatatcgaatatttggacaaatgcatggagtattaaatctttacctattataaaagtttaagatgtttttgtccagaaaatttcgtacgtcactcgcctgatttttctccctcgcgcgttccgtccaatttttttttcacacgtggtttttttctccggtttttttccgcccgatcttttttggtcgtgacttttagatccgttttttccatcgcctgttgcacacgttttttttcttttttttttcaatccgaatatcttagatccgtttttttcctttttttccatcgttgctttttttttgtcaatttggatatcttttctgccacggtttttctattgcgcatgtgtaaggcttccgagcttttatccacctggtttatttttt

SEQ ID NO: 51954 - DNA, 672 bp, Oryza sativa
ttttattcaatcatcttctgtccaacaaaatccaccctctgttccaacattggctgctgtaaaactggctagctggctaagaggtgctaagtttattgtggactggcataactttggatatacactgcttgggttgtctcatggcagaagccatatcattgttaaaatctacttctggtaattcctgtcctgtttgtttatctgctagatgtagcatactgattgtgtgtgttaatatagtggtgtgttctttgcattctaagttcgagaagcattttggacggatggctgatggtgccttctgtgttacaaaagcaatgaaacacgagcttgatcaaaaatggggaatcaagtaagatcaaactttcaggcacttttcatgtttaaggctgttgtgttagcacacaactacttttatttttgaagtcgctagctacagtttatattaacttaactggtcggatttcagcgcaacagttctttacgatcaatctcctgaatttttccatcctgcttcattgacagagaaacatgaggtgagcatctgttttcatttatttcctcatctttgctgtactgcctatctgaccattagatgaaatagttgtttagcaggttggggaattccatttgtagtgctatgggcaatgacgattgcatttctgttggtat

SEQ ID NO: 51955 - DNA, 680 bp, Oryza sativa
cctgccgccgccgccgccgccgtcgtcgtcctcgcctccggtcaccaccgcctgagctcgaaccagcagcctgagctcctcctgcagcctgtcgagctcgtcggcgcccgccgccgccgtcgtccacggcgtgccagaaccatgacggcccttcggtccccctaacgtgcctatggcagcatcgccgccgcccagccgtcgtcgagctcgtcgccgttccggtggagatcaccggaggtatgagcgcctgcaagagatcaaagattcagcaacaattacgtgactgaaactctgaaacgctgggaattctgaaaggagaaaaaaaaaaccatcgtcacttacgtcgagatgacactgcagtgtgatcttgtttcctcgtcccgtggagccttgtctgcacccagttcagagcctgaaaccgaagtagaaccagcagcagcaacgattgctgaattagcatttgtcattcgatgtaaaaaagttcagaagaaccagagaatcgagtgtgtaccctcatgagcagttctcgtgacctcttgtgtgcgagttcagaagaaaaatgtggatgaatggactcaatgggaagaagaagatggatgatgatccaagactccaagttcactatatataggggtaaactctgatcttgttgcaactttacagaagcatgcgtatgcagg

SEQ ID NO: 51956 - DNA, 591 bp, Oryza sativa
aacaggggggaagctgatacatgactggtggaggattaaggtggctgccatttggggactctagaaagacttaattgttggagttagaaatacttgatcgttacctctttgtaaaattcctctttgaattagaaatatttgggggatgctatggtcaatcctttttcattgatgaacttgacactatttaaagaggtatttgtaaaattcctctttgagttggaaatatttggggatgctatagtcaatccttttttcatcatgaatttgatactgcctaaagagtataaaaaatgatgcaaggagaaagaagcgttgctccaaacaatttttaaagaagaaattgtaagtatgttggacattgaatacgggatcttatagttgaaaccacataccccttgccactatactatcaagtgcatttaaaaaactatttaaagaggtatcaaggtaatatatattataatgcaattttttatacctctccaccttttatactacactatacggtgcaaaattaatgatgcattttcaaaaatgcaaactatatatcggagtggtatatattccaaacgctaacgatgtaatatg

SEQ ID NO: 51957 - DNA, 589 bp, Oryza sativa
aaaactccgcgcgggattctgcgagcaaatcttctagcgctgagcaaacccgaagcaaagcaatcacgacagaaagatcaaacaccgtccgaatcccttctccccgagatgagctcaactccagccacatcgaatcccaaatccacccagcacaaaaccttactccagaaggatcagatcgttgctcagacagagattccttccataacctttgcccccaccgaaatcgacgggctccattgcagaagtcgaaatctgccaggtttttttctaaaagagcgccgcccaggagcagatcctggcacgaggtgcgcgaaatggcgggaatcggcgcggggattggttggattcgggggtttaaagctagggtttagcgtgggggatccggattgggatttggtgcgggaggttggataccggaggcggaggagatgcgagtgacgaacgctctctgcttgccacgagagccgcctcccctcgttgtggggcgaggcagcttggtgggccgcttgggctcaactcgggtagttgggccgtaaagagcaaaagctgtctatgccgtccaagagggattatgggccggaaagcc

SEQ ID NO: 51958 - DNA, 765 bp, Oryza sativa
tcatccatgtcgtttaagaagcactcacttagttgctttcagaaaagagttcaaataaaatcaattgcaaaaacaacagcctttccttgaagcctgcattaaacacttatttcccatggcttgctgagtactcccgtactcacccttgctctatataaataatctcccccccagttgctgaagaagatgaagcggatcccgctgacgaggagttcttccaggagcaagccggctacgatgagttttagggtttcggcctagttcccaagtcgcgcctgtgttgtttggtccaagtcctggcttccgcttcccttttgtaatgcagttgtgagctcgggatctgtccgcagcccgacttgattgtactcctactctataataaagagacctctattgctgtgatattctgtcttcctgtgataccagcactgtttcctgggactggtatcgattaataggttaatttggagcgtcacgggctagttccggtcggtactagttctgggcgtgacaacattccataatagatgacacgagttcatcttttaccatctatctttttcagtgttctccttttccggtatttatctaaacgtgcatcataactttttcatagaggaagcacacacaactcaacaaaagctataaattgctcctaagcataatttaacacacgatcaattcatccaaaaatagatctcacactggattgagaacatcgttcaaaaaaaaaactcaaccaagacacaccaatcatattttaca

SEQ ID NO: 51959 - DNA, 591 bp, Oryza sativa
aaatatcaaaggagattcgagtcaggtcctatatcaaactaaagggtcagttctagttgtcatacatcctgccttggtgtaagcaaacaaaaatatgatatggtctctccccaaccttcaaatgtacatatgccatatgctcactcaagtgcacagtgcgcctataatctctggaatgaacagatgttcaagcaagctgtaacaaatacatgatttgcctacctgtcgaatgttatcatgcatttcaacctatgacctgcaatttgagaaagggaaggtaaggcttataatctatggaatgctgtcatgcatttcaacctatgacctgcaactgcaaatttccttacgaaagaaattggtaaggcatactcaggtgactgtaatgaccatatttagtcatttaggttcaagatccgacctggttcaccaaggggagtgcataacgttcccattctgtcgaccatttggaagatgacccagtattcaaggcaccaaccttgagggatttcaagtcatcgcattcttccggaaaccccttaaagagcatctgcatggatttgcgattgcaacaattaaaatctagacacagca

SEQ ID NO: 51960 - DNA, 1269 bp, Oryza sativa
ctttacccgcagtccacgactgccaaatattcattagcttagtcatggcccagtattaggttattaacaattgtggtacctgttccatgaacttatatcctcatgcgctctgaacgtgacgttaactgcagcgagaggagttctggcgttaccggggtctttagagaggactgattgtatgacaccatgtcatcgcaatcagggttcacaaacgtgatcaaatatatctcaaatacatatttacctgtgcctcggtaaatatcacaattgccctactcggcgtaaatttgcctcctacacgaggactttaaaatagaaccactgtacagaggtaccacattgctaattaacataatagctaggtttgtccctattctagaagctgcggtcgtactcgttcgtttgacataagtatttggtataaacttatatcgactgagacagtactagccacccggaaatcaaccatttctaccgtactgtcccaatctaagttcattaaattttatgcataatctaactaggcagggctaagcaaaagctagcatatctggtttgctatatgttcaggttatgcattgaaaatcatgaatggctaatgcatgagatatcagagatatagaatacagggcatttatgctcaaaggagatgaataataacttgccttgctccaacgcaaataaatccgagataggcaacctgattatccgattctcgaaataccaaaggttgccatccaaaataaaatagactctactaagaaagacgaagaaccaatttcaataaaatccatagaatagcaagaaagagataaacagttaggagggctagggtttagggtatagtctatctcttttatagggtatatggattactgtgctaatatcttatgcggaggttctagagagttggaggctagaggggattaagcaactactatcgcttatatttcatatgtgggtttgattagtaggaggatgggaagtaactagtttggataatggtattggttaaaagggtatgtggttggtattcattggcggtagctaggtttaggtcgtatggaaactaaggtctagttgtcctcgagtcgatactgaaataggatagcatatcagctcggctctataattttatgtgtaggttctggtaggtggagagtaggtggtggagagtatggtggataggcgatactggtgggtgtggaatttggatgacaactggaatttgactgggaaggtattagttagggtttggttatatgctag

SEQ ID NO: 51961 - DNA, 1047 bp, Oryza sativa
gccagaaacactccagtgagggagatcgacgatggccggtggtggtttgacatgagaagagagagagagagagactgagctcacggctcggttgtggaagaagagagggggcttcaccggctatttataggtgtcgagaggcggtagagtaggtcggttcggatggagaacaacgaaggatgcacggcaatggcgacgtggggaagagacgacggcgccggcttcgttctccaattggctgttagtggcggcgcgtacacgcggcgaccgcgggaggagttgggcagctgggaagggaggacacggcacggcgtcggcgcgacttggcggcgaaggaagggcagcggcgacggttgcttggcggaggaggagggcaaggcaccgcagcggcggcgcaagttggcggctcggctgggtgttgggccggcttggactgaggaaaggaaaagaaggaaagggagaattcggcccaaacgtagaaggaagaaagtctaatttttcctggggctgaataatttgatttagaggagaatttttatttggaaggaatttgaatagaagattttgaaaggaaaatatatttggagataatttgaatagggaaggttgaaaggaaattatatttggatctaatttccaaaagagatatttctaatttgagtgcaatatttttggaagtggaatatggtggaatttaatgcactcaaatgagaggggaattaacaatataattcctcaatatatatatatgtttggaggagaatggttggaggtaaaataaataggatttgaatcctaaatttgatagtagaagtatttgaagaattatttgtggctaatagggaaagttgagtgaagaatataaattggtattttcttagcacaagagcaattattcacaatatttgcaataatactattcttgtgccgaagaggaaatcaagccacaggaattaaatcagtggctagatcaaaaggaagaatttggatcaagaatcaaaggatgggtttaagatcaaaggatgggttaataattaattccaataa

SEQ ID NO: 51962 - DNA, 670 bp, Oryza sativa
atgttccagtctaagcatccgagagctcctggttcagctcttgatgatttcccactttgttgctgttagatatgtcatattatgtccagttattcagtgcttgcttatatgcatctatctttcttccatatttctatagtagctcgtgcctctgttctttatgctttccctctccattatatattcatccatatgtttttccgaatgtgtctatattttgctcctttcgtttcttggtgtatagaaatgacatggagccatccagattcgttcgcatctgcccgcggaagcgtccacatggtacttggtgatatcattatagtttcgtatgcaagcctcggagttagcaaggccattagcgatcctttttttccctgattcacacttttgctcaccaatagatgggtcctccatatcatctgctgccaataagcacttagagctcacgggtggtgtgtcatgtgccataggtatgtacgctcaatagtctgagagttagcgaggtcattaggataattgttgtttttttgtttcctgattcgcaattctgccttctgatagatgagccgtcatcatcccacggtgccactgggttctcaatgctcacgggtagttcatcatgcactataggtatgtacgcttgctgtagtcgctgctgtctcaatgttta

SEQ ID NO: 51963 - DNA, 612 bp, Oryza sativa
ctcgcggcttggagagaggaaagccgatccgattcgaactcgaatccatcgatttccaaaccgatttagccgaagtttccaaaggagaaaaggtagaggagatcccgaagatcatttcccctctatcaattcagccggaaacggaaaggagcggccggattggaaagcggctgtcgcgaccgggaaaattgccttttcccgaacgctagtgtattaatccccgtcccaggaaaagccggggtacaccacacaaacatgatataaaagacacatctttattatatcgacaatatttacattattacaaaggcacttaaggcctgacaatcaaaaataaacagcagcggactagcgggcctacggctccatcttcacaggcgctcaactggggtataagccaggactccccctaagacatcttctccaaagcttctcttactgaagaggggaaggattgagcaagaatgagtacaaccacagtactcagcaagccacaccggcagatgcatgattaatgcaagggaggtacaagggaataataatatagggattaagttttgcagtaaacagcatttaaaagtcacttagttgcccaaagccattttgtaaaga

SEQ ID NO: 51964 - DNA, 967 bp, Oryza sativa
ctctaccctagagggtggcttaggttctgcgacgggttctccaagatcttcactcctgcttcacagctggcttcactgcttcctccacttcactagcagatcctgcagtcttccggagcttcggcgaacaactgacgatgtcttcttcttcactgacctgaccatctagtactagttgaaatccgaagaaggaagaacggagtaaaccttttgcaaatagcattaggggaaggagaaaaaggaactttcgcaaataatttttatttataaaatatgtccttgggttttatccacttggcttatcctacagtcgagatggctctgataccagcttgtcgcgaccgggaaaattgccttttcccgaacgctagtgtattaatccctgtcccaggaaaagccggggtacaccacacaaacatgatataaaagacacatctttattatatcgacaatatttacattattacaaaggcacttaaggcctgacaatcaaaaataaacagcagcggactagcgggcctacggctccatcttcacaggcgctcaactggggtataagccaggactccccctaagacatcttctccaaagcttctcttactgaagaggggaaggattgagcaagaatgagtacaaccacagtactcagcaagccacaccggcagatgcatgattaatgcaagggaggtacaagggaataataatatagggattaagttttgcagtaaacagcatttaaaagtcacttagttgcccaaagccattttgtaaagacgatcctagagctacacagtattattaaacaaggccgtgaaccctcacgaacctgccttaacccaaggcctacgatgattcggaccgaactggcaacccgacctgggtcccagctcgtcccaagccaacccaggccaaccattccatattttagttgttgagcaaattttaagaattaaaacactgacttggg

SEQ ID NO: 51965 - DNA, 1884 bp, Oryza sativa
tagtggaacactctaactcatagtaccactaggtataattttaggtagatgcttcgctgattaattaggtaacattaggcggtatttacaactctagactttggaatattcatatcacctggacactttggaattgttggtttattgtggaattggattcacaccgccccctctattcaaaatccccaaaatggttttaggctgggctcggggtgcatggttttgatagtagcacctcagtcctgcctgcctgtcccggaggttctggccgtaggcgggattgggtcggtactcttgtctatggctaggatgggttgggaactatgtcacgtcttccgtccgtataccgtggtggtatgtggcacgtggttacacgtgaggaagatgtgtcttgtgggtaaagatgtacacctctgatcagagtataatctattcgaatagccgcgccctcggttatgggcaagccaagcaatgtacccaagttagtgtttgaattcttaaaatttgctcaacaactaaaatgtggaatggttggcctgggttggcttgggacgagctgggactcagggtcgggttgccagttcggtctgaatcatcgtaggccttgggttaaggcaggttcgtgagggttcacggccttgattaataatattgtgtagctctaggatcgtcttataaaatggctttgggcaactaagtgacttttaaatgctgttttctgcaaagcttaacccctatattattaccccttgtaccccctttgcattaatcatgcatctgccggtgtggctcgctgagtactgtggatgtactcattcttgctcaatcttttccctcttcagtaagagaagctttggagaagaagtcttaggtggagtcctggcttataccccagttgagcgcctgtgaagatggagccgtaggcccgctagtccgctgctgtttatttttgattgtcaggccttaagtgcctttgtaataatgtaaatattatcgatataataaagatgtgccttttgtatcatgtttgttcggtgtaccccggcttttcctgggacggggattaatacactagcgttcgggaaaaggtaattttctcggtcgcgacaatgtggataccccaagacaacgcacatgccccgcagctccaaagcgaagccagtcaagtccagtccacgacgggtgatgctgccggccatctacaaacaaaacaaaatagaaaagcaacattttaaagattagattttgacaataaatgaagcagcaggacagagaaagactagaggattttcacaaataagaaaggatttttatttcgaaaatatcgctaaggcttgggatctacggctcgtcctagggtcaagggggctctgataccaacttgtcacgaccggaaataacccaacgggcgttccttacgtgcgtgtattattccttgtcccaggaggcaaggtacaccaaaagttgatacaattcagagtttaacaagcggaagcgtaaatagttatttattacatgggcagcgacggcccagcacactcaaagacaacgaaaaacagcagaagactaaggcgacgaccacaggcgcttgacggcaggcacgagctagacaccaaagccttcatcctccaggggctcctctgctgggtttgggaaaaattaaacaagactgagtacaactaccgtactcaacaagacacacccacaagtgcagcataattgcaaaggagtacaatggagttataatataggggttaggttttgcaataaacagcatttaaaagacccatagttgctcaaagctaaatttaaaacacgatcctagaactatttaatattattaatcaaggccgtgaacccacacgaacctgccttaacccaagg

SEQ ID NO: 51966 - DNA, 579 bp, Oryza sativa
ggtccagcgtcgatctcaagtgctcaagcataaatcctagttcacaagcacttaatcccctgaaattccaactcaaatcccataaagatttgcctcaaaggtaggagagagaggagagcttaatgagagagagacagagatggggtgaaaaatcaaagaggagaaagtgtgggttagtgggtataaatacccccaactcccaactagtcgttatggcatcgccaacacgatcatggagtctttgagcatggccctagagcctttggcctgccacatcgttgtggcagaaactgtggctcggaggccctggaaatgggcatcaacactcgaggagactttctggagtctcccagccaaacaaaaggaataagttcatcaaaggtcccttaacttgtcaacgaatccgattttcatccttcaatcacaaaaccagatacaacggatccctcaactatcaaatctggtacgaattaggtccctcggcggtttcaatagcagttttggctgacgtggcgcctacgtggctaatttgactcggtctcgatctgacgtggcactgacgtggcgcttacgtggcaa

SEQ ID NO: 51967 - DNA, 572 bp, Oryza sativa
ttttttcactgacgaagtagcagtattaattccaattaccactagtaccgggtggttcacctgatggtataaaaaccacattctaaaaatagcagtagtgggctttctattgaaaccagttactatgtgggggggctaataaaaactcaaatctttattaatggggtcttccatcttcattgagtcgtctgcaggtaatatgtcatggatccttgtgctcggttcagttccgttcagctgttcagaccttgatctgtactgcctatctaccttgtttgaatgaatgccaagggactatcttgtggatttttttttattggcacacacactcactgactcagagatcaattagaagtcgagaaatattggtttcatgcaagcaaaggcgaaacaataatcaagttaaacttcgattcgaggcttgccagttagccatcggttagacaggcgtacctctgtttggatcggtcagcatagctcagtaaacatcggtacatatgactggcctttgcgtgaatgctttgatcatctttctaattaggaccaaatttaatggtcgtcaacacttggtt

SEQ ID NO: 51968 - DNA, 624 bp, Oryza sativa
tgcgcttaaagctacgtacgacatatttgatggaacttttggaggtgatcgagtacatttttcctttccctttttattgtttgcctttttctctttattttccctttcctttctcccgatacctttcgatgttacctttcatttctttaattaagatcgatgcatgcatggctctggctctccatatgaatatatgatctctagctcatctttatatacagtacatatgtctctcctttttatactgatgtgatcgatgtatgttaagggtgggtttagttggggaaaagaaaatttttgggtgtcacatcagacgtttgaccgaatgtcggaagtgtttttggacacaaatgaaaaaactaatttcagaactcgtctggaaaccgcgagacgaatctttcgagcctacttaagccgtcattagcacacgtgggttactgtagcacttatggctaatcatggcctaattaggctcaaaagattcgtctcgcgatttatagctaaactgcgcaattggattttctttttgtccacatttaatgctccatacatatgtccacagattcgatgccatgggtgaaggggaaaaaattttgggaactaaactggccctaatcttgaccc

SEQ ID NO: 51969 - DNA, 688 bp, Oryza sativa
agctctcaagtatggcgacgatgtcgtcgaactgaggccttctgtctgggttggtcgcccagcactgagttatcagatggcttattgccacagggcatgaaggaggcagtggtggcctagcattctgcacaaaagctattagttgcaaaagtccaatagatgaaggtcatcagtaacagataggacaagctaaccgactcttattttccaaacttatgggatcatatagatatttgctgcgcaacacaatgtgtggaaaaacaccatattttcagcctattcaaatttcatcgctagttgagcagtaattacctaaatggatcgagcatgtttaatatgttttttttttcaagctagaaaccatgtcaacagaattacaaacaatttttggggtgatacagaggatttaagcaaaaaaaaagttcaggcttaattaaatcctctaattacccgcaattttgataccaataaagttcaggctaattaaatgtccgccatagtttccataagggaaaaaaaacattttttactctcttacagaaagaaaccaaaattttctactggtactgcgactgaaaaggcagcagcatctcatgattttaacagcctacattatagccaaggaaacaaagatggacatgaagattggagaggtggcatgtcaaaaattcataccttcaaggccaca

SEQ ID NO: 51970 - DNA, 708 bp, Oryza sativa
aactgttacgaaagattgatatacaaacatcattatttaatggttaaaccacgtgcctccacaaggataataagttactgacctacagaaggtttctctacactaaatttttcgtggctgttctgcttttatttttctatttgtgttgtttggctttcgttcttttcttgatgaagagtcgtcagagaagcaggttatttatagtaattcgatccatgctgttgcctgtaaatctttcagtttcatcatatttttgaatcattcatatgttttgctgtattttatttatcatatacaggtgaaagaaatgtttggctttaaatcggatgagccaaagaacttcattgaacattgctgctcatggttactttctttccttattctgaggggtgagactgccgatcttaattggctatccaaggtgaatggatatttgttttaatattggcagtcatgtagttcaatatttgttgtgtttattgttattctaaaattctggaagcttgccagttttttatttaactgtcaccgtgttaaggactaggatctccatgtggaactcctaaatatggtcctaacttgttggtttaataaacttttatacccctgatttttttaacttaactgtagaaagtggtcatactgtgtaacatgtcaaacaccaatttcccttaaaattatcaactgtgaagtattttcccttttcaa

SEQ ID NO: 51971 - DNA, 1023 bp, Oryza sativa
aattcggcttactggatccttgaaataaatgaaacaagggtttgttgaaaaatagttctaacttcggaccaatagaaacctgttacctaacttctcatatacaacttatttctccatgctttagttgcttaagagctctgcagaatggtgattccgaggagttccatgtgaagctttctaactccaagatggtatttaatttcatctgtggttcacttccctctgttggatttattgtgaatctagcttctaatacttattattttatccccttttaggatcttgtgctggctctttcaaatgctagcaaggagagcacaaaatacatccattctactgttatcaaactacaggtactggcttgttatcttacaatgatatacttgttgtgatacttggtatgaggtacattgttactctcttttgttattttatagatgttagatcatcttactatggcttgggacctacgatggaaattctgtctcaatcagacatcaaagtcttatgttggaaacaaggatttttctccagttccaactgttcctacaaggatgcaggtttgtttcacatctgttgtagtcatatataatattttggctagttctctcattattttgtttgaaataaatgcgactcaatttacattcagatttcagatgtaagtttgggaactgttgtgtgtctatatctatttatgtaacctttttaggttgccatgtgcaagcgttcgcgaaaaaggttgccatgtgcaagaaatacccccactgtttcacagcattatacatgtaacactttagcatgcattgtctgttcttatggagatagttctgacatgaacttctgttcaaaatagacaattggtttccttcacatacatgtaacactgtcaaatgtgcatcgaggttgatacagaccagtcactgtcttatattgacttttgtatcctcccactgattgtaaatcactttggatgcctaagatagtagaatagctacatgtacatgttctttttcattcccc

SEQ ID NO: 51972 - DNA, 624 bp, Oryza sativa
cctctcttctttccgtcttgtatatatagatttctgtgggttattcccgccatttcaagcaatccatattccgtccgtcagctactgctagtggtaggctagatcatcgatgaacgccatggatgaggaggagcaagagcagcctccccagcgctactggttcccgtactggaccagccctcaccgcctccgccgccgccaccgccaccgccctccagctccaggtacaggccgccgtcacctccctcatcgcgccatccccacccaaccatcccagctgcccgcgccgcaccaccgctcgggccaaccaaccgccgcttgcatcagcagccgccgccaccagcaagcagagatggtcgtcacgagcctcctcccaagcccaaggacgtcgtcgtcatccccaccgacaccgtactgcatcacaaacaaccaccacccacgcatcatcatcagcatcagcagcacaaggtgaaagatcaggaggagaagaagggcgacctgcgcaaggacctcaaggcggggctcgccggcatgctcagcgccgcctcccacggccagcaagggacaagcatcatcacgctggccggcgacaacaagggcgcatccatgaagatatcctccccc

SEQ ID NO: 51973 - DNA, 678 bp, Oryza sativa
tagttagtgctggtgattctgtagccactgagaaaaagagaaaaaagaagagggagagagctgatgataccgacaacgacaaagagcaagtagagcatacaaggaagaagccgcggaatcggtcctgattttaggtttagtgcagcccattctgattgaagctgttccagaatttttgaaggtggtgtggtgaggttgttctagctgctgtattctatcttcattttgtcactggggttgggttgtggacttcatggttttatcttgtaatatcaatccatatgccctgcttttgtaacagtgaaatttacattgttgttgtcccttgactccctgttactctggtgccgtcggttgctaatttgctgtttatatcagtgcttcagagaatttcttacaaaacagtgcattcaattttagaatattcaataccattcaattctataatgtttggttggcctttcatttctaacgactgaatccatttgaaacaacaacacttctgcaatgtattgttaagagatgtaatgcttaaaacttgcacgtatgaattgatgtggttatttcagctttatcgtcttgtacttacttgcctgtatcttgtaaaacataaacttgatctcgagtcaaccatgtctatctgccctcttgtagtatgagaaattgtgtaccatgtat

SEQ ID NO: 51974 - DNA, 635 bp, Oryza sativa
ccatgcaaatgcttgttgtgcttcatgcttgagcttgcactttttacacatgtgccactggtgattgaaatgccttggacctcaattctctggttcctttggttggattaaatttgaacttctggatcattgcagaagggctcatgtgactttgcaacactaatgtatgttgagctttggtgtgaggaaaaattcaatatgctagcattaggacctccagatttttcgcacgaagagtcggtctgtctcttatcctttcttcaactattactttcttgtgtgtgattttagctctaccgtagttttgccacatgcccatttatgtttcttgcctttttacagttgcccccacatattgatctactggttgcttcatttactcgcataaatgagctggacagcatttatgggatcacactggcgaatgaggtttctcataaaaaaattctcactattttttgttgagttttggtaggcttaggttcatactttctatatgaactccaagttattcttaaagtggtcattggtcatggtacatttctgtatgaacttataagttaggggtatcagatatacatgtgtagacccattatttaagtgttaagatcttaaagttatgttttcctcttgtt

SEQ ID NO: 51975 - DNA, 601 bp, Oryza sativa
  unsure (1)..(601): unsure at all n locations
ttcatctgataccggtactccttaacagttaaaagctgcctaagaattatgctgtactctatcagaaagctgggagcatcttttacaacctcccatatatgactgaaaagtttcttagcgacggaaatcaaaagtaacgaccgccctgcagagacaatgaacctcttgtttatcgtcatacagaatgtaaaatattccacttcaaagcaattgaaaaggatgtttgcatatctggttaaacgcgaagcatactgctgggtgtctggcaagtggcaagtgagaagatgcataaataaacaagagtacatgaaaatcaggagcatcccaacaccaaaggtatgagcattactagcaggcatgcatgaaagagaatgcctgagcacctcctttcagccctcagcagtattctttattggaagttccacgcagaaatttacgagtgaacattaatgctgtcatgttggagtagacatttgacaaanaggaacggatgcggataaaataaacgttaaattgggttaggaataggtaggcaagatgagtcggggtaatggtacacatagcataagtcatggaatgtgcaagtagctgcaaaatgtgt

SEQ ID NO: 51976 - DNA, 847 bp, Oryza sativa
gagtcggtacctacggaggattttatagtaatggtccgtacttttatttcagattaacggctaataatatacagttccccaatgctaacagcataactgtgccctcataacctcatttatgtttgagtaattttacagctcttgaaaaattactaaaagtcatcatgtaaaatttagtagcacctgttaataccaaataccaagacatgtacataagctctagatcttacgcttaaagtttttctcttaattaaagaccgtgaaatttctctttacctcagcgtggacccaaagtagtgagcatgtgagtactatcttcacgtgcatacctgctggtttcaatttcttttttttaaaaaaaacttattttacaattaagcctttctaaaacttaataaaaaaaatagatacatagctcggtgccaagggtatttggagctgaagttgaatggtctcagcgtcaaataaagtggtgtcgaaacctaatcctcagcacctacctccgtgtgccacctatatgaacaacttccctctctcccctattacacctttttgaatcatattgatttgctatcaataggatataaaaaatgcttattgcatgcttcctaagcccgaagtaattaattcaacatctttatcttcaaggaaaaaaaaaaaggttacgataatactcgatttcttaattaacttgcaatgatttttttttcttttttttaggaattgacaatgagttggatccttattgggttcggcggtggtggacggcagggagagacggcaagaaagctacccaaagggtggggtgtgcatgcatttaattgaaatatatgtgtacaacatatat

SEQ ID NO: 51977 - DNA, 574 bp, Oryza sativa
gatattaggattctattgtggtagtagcgttaatttatctcctagcttgaaacctctgtagaacttagtggaactaccaaactagactgagggttccgaagaattgatcggagtgttcgaggaagtatttaatcaaagttcgtttaaaattataggtttaatctatttaccctcccttttgggcccaacaagtaactttcagatttaacatctatgtatttcacgtgggcatagacacacgtaaattctctaaagagataagaaaaggaaaatatatatatatggtgttcaattaaatgggcaaagctaggcaggaggtaaatagggggcagtgggccactcaatgactgtattgtcgtactggtgaggttagtactagtactggtttggaattggatgcaaaaaaattaatgcaataaatatggcatgctaagtactcctttggtaaaaaaatactcaacttagaagtgaaaaatatggagagagtattactaagggcatcaggcaatgagggttcatgcaggccgtaaaccagggagcaggggagaagcccatgaggctgttagctgatggg

SEQ ID NO: 51978 - DNA, 763 bp, Oryza sativa
acctgcatttagagtacccaagtggttgtgaaatatcactgtatgatttctagaacatctaaaaatttgattggtattttattgcacatttataggttgattcagttctgaggttgttgggtgaaatgatcatgcgggtgagcttctcattcccaattatcttaacagaagctctaacatattctgtgcataatttcaggccagttatagttatttcgagatatcattgatattttgtgctttccttcttcaaggaccaagttcatgcatcatttgtgtcagaagatacatgggacctacaaatatttaaacaattaccatcatcgtacgtatgccctctttctgtgagactgaccatttattagttgtaatcttgcctcattttttcagtacaacctccgttaaaaaatataagaatatttgaggctgaccatgggtattaagaaagtaggtggaattaactggggaaatgttgtgataggttaagaggaggaagtaggtggagaaactccagaaatccttatatttttggatggaggagtacctgcatgtagtgagatatgcatgggccagttaaaaggtccaaactaccttcagcacagtgctatctatgtacctgaatacatttaacttgtttttgcatgctattttcatgtcagttattttctattgtcatgtgaccctacctactagtctttcttctcacggtaaatatctcctattctagaatatattgcatacagttaaactgcatcttgatttc

SEQ ID NO: 51979 - DNA, 505 bp, Oryza sativa
ccctgccaaaaatatcagcaattgaacttacaaatctcggaaaaaatagagaaaatattgacagcccactccagaatgtagtttggaaatggatcataatgtaaattgaaaaatggataatcactaaccacaaacacaaataaatgcatgatgaaatgataattaaaggtccaaataatgggaccatctatctggatttttttcccttttgtagctcacatttgtatgttgaactattcaagaaccattaaaattagttatgtgattcaactagtgaaagcatcacacttccattgcagaatttaagttacaataaattacttagatgagctctatatatatcacaaatatgaagggcatctgtatatatctaggaataatcagaaggaatataaagcatacaaatgtcaaataagtccttgtgatgattacagtgataaataattatgttctactgttgcctaaatgtgtgatacttgtataaagtttactgatctatcaccat

SEQ ID NO: 51980 - DNA, 703 bp, Oryza sativa
ctgcaagtgccaacccatagtgcaaagctcaaactactccactgtgagacaaaaccacaaaatggtcagaaaaaaaagacggtatgctttaaagagcatactgactctgtaattagtctgtatggtggtgaacagatcaaaactatggcgaaacattttaggaaaaaagaacttgctatctgtagttggcaccataagcaggatgcaaaaatgtgctaccataacaggaaaccaaaaccacacacagcttcctgtacttagactggaggatgctcccagtatcactccactaacaaaccgcaacttgttcatctcacataaacaaatgaactgcatggcatacatcagaaacaagcagcctaccaacagttgacaaataaatcaatagcagtacctaattctgaaactatcgccttttccccttccaagagtacgggaatggaataatctaccagactactatcagatcgcgaccaatacatgcaagaactcacgtagcaccttggaactaagccgaataagcatatagacaaggagcgggaggggaacacgagtgatctttacccagggaagaggatgagcggccgaaatccggaggagaaagaaaataaggtggttcgtgtgcgggatagatggaggagcgtcgaggtgcacgcagcaggtccacttgtgctcgccatccccaggccctagcctcatcgcc

SEQ ID NO: 51981 - DNA, 564 bp, Oryza sativa
ccaggcccggcacggcacgccggcctgtgggccgtgccggcacggcccgtttacccgtgccgtgtctgggccgacgccatagcccgtgggccagcacggcacggcacgtttactgtagagggctggcacggcccggcacggcccgcgagcacggcacggcacgggatcggatcggccgcgcacaccgcggcaccgcgcacgtggcgccaagcggccgagccgccgagggcagccgcggggccaggcggcgggaagcgcgcgtcgcttcgttcgcgcgtggcgcgtggcaagcggcgtcgcgacgtgtcggcgtgtcgctggggctggccagctgggaggctgggacgctgcctcacgctgggtcggtcgctcactcgctctcgctgcctgtctgcctgtctgccactctgcctccgtgcctcgttgggagcagccgagacagcgactcggcgagaccccgtacggcggccgaacggctagtcaaacgacgaatgcgagagtgccacgtgtcccccaacggctagtgagctaatccaacgaccagaagtagccgttggagagcaa

SEQ ID NO: 51982 - DNA, 543 bp, Oryza sativa
ttttgtgtgagagagttccacccaactctactcccatttaagctgaactctgaaaaaggtggagctgaagttggaactgtaccaaacaggcctgtagtataaactgatcgacatctgtgacaagtcgatacatatacaagggcggaagcaggaatggaagtgaaatacaattcacagaataatttggtccatggacgatattgtgtggtaaaggttagtgagggtcaagagtctattgcagcgagtacaatagcagattataagtcagttgtatgcacatgtggaggagagaagtgaagagggagaaggaaagcgggctacagatctgtagccagcagcagcacggaggattccaatacgttgtgtgtgtagtatatgcttataggtaactattgtatgaataagttattagattggttataaatgaattggagtttgtagtagttggttgtagtattaaacttgctcttactcaagtaaggaagtaaaaatttacgtctttgcccctgctcagtgtaaaattgacccctgagcacggtgatg

SEQ ID NO: 51983 - DNA, 1205 bp, Oryza sativa
atgggccgagagaaattcggcccatcgaccccgggggaggcaaactagacttttgcggagggatttgatttggaaggatttggattcggaattgaactcgacgatagatcggggattgagatcttgagagggcacggacactagacaacaagcgaagaaacaaattttgcaattagggtttttaagagataatttttccgctaggcgccacgacagaacgggcgctacacctcaccagcactagaaggcactaacggggctagtgaggcccattagacctccctctataggcctccgtgcctctctccacctcaagctgacgatgacgaggtggcattcctacctcgccgtcttcctcattttcaatagttccccgccattagttttgctagcgcatcacacgtacgatcatccccataagttaggggaactacccccttccaccttgacctcatcctgatacctaactcggatttgctgctgccatcgttggagatcaacgagcttgtcagggtgggagaagaaggccctcatcggtaagccaagagttttggctaatcagacaaagttggacttttcccttaagctaaagaaaaaccattgattggcttaattggcttgatgaggattttctgtggctggtggtcatcagcccaataagcgattcaataggctttagctgaaaagtctcagcccaaacatccatctgacgaggcccgaaatgtatgttttagagaagagtgtacgagtctcggagtatattggatggtctagaatctgtaatataggggcttcgattttctatcaaatggagactattgtaatatcccctcatgtgtactggtgtgttgactgttggctgatctgatctttccgggtgtctcgagttgttaaagatgtttcaaatttagctagtgatcgtgtgattttcatgacatacctgtaaattccattttacgttttttacatactagcattgtgagatgttaattaacagtttaaaattttcaaatgtgtatttgtggccggaggtagcaagagattttaaaaaaataaacagagatggccatgcacgcgcgtggtgtattaatttcatagcctcacgaagaacacggcgagctccgggcagtcgccgccgtgcgggctgatcatgtagagcgactccgagttcctggagccgatgatgtgctcgaagctcccacgca

SEQ ID NO: 51984 - DNA, 974 bp, Oryza sativa
tttaaggtttccttgctgctgctgcttccaacggtaataaacccaaactgacggtctccctttctcgtgcctgtccacgtgttcacctttgcagccgtccagatggcgtccctgacacccgaagctgaagctcccggaggaggagccctgctcgccgccggcgacgacgtcaccgccgcgaatctgctcgccgccgccgtagccaccgaggtgagtaaatctgtccagctcaaagcccacagctccgtactgatgatctcttccttgtcgttttactactcatttgtgattagttttttttcctttgtcattctgtgtttgtttactataggcaaaaagaaaaaaaaagtactagtactagctcgacgctgctctgcaccgttgagcgagatttttttattttttttgggtgagatattgtctcttggttttgaaggacttgccgggtgcggattcgtggggtgggttttagggtgcggttttcagctcgggatttgagttccgtggaggtgggcccgggggggggcatagtgtaaaaaagcgcccctttgtttcttgcttaccattccagcccgaatattcgcttcttctcaaggacatagagcgaatattcccctctttagatatttctttgtaaaaaaaaatctggtgaacaaaagtaagtgtgatttgagttgcttaacttgtactcactccggacccatcctgtcataggttttaatatattgtgtcctagttttaatatattgggacggagagagtaagcagcatgattagtaggtgatttggttagtctagcgatgtatggtacgcatctagttttttttttcacataacttttttttaagcttgggaaagacttgagcgcgaagggtgtcgtctcacctgcttgcgtcggtgtatatggctgtactttttttttctccaagtgtgtcgttttagctgtatatgcctgtactattgtactagtatct

SEQ ID NO: 51985 - DNA, 1105 bp, Oryza sativa
agggtagtcaactgattcagtagcaggttttgtaaaactaagcggttaacacgtccttaaggtaaccgtacagttttcacggtaaccgtgatcattttcatccaaaacagtttgctgtaccctgttgatggattcataaatttctatttgatattagtccttttttttccctcactcaccagatctccttttttaatattacaaacagatattgaggatggagtagatattatttggggggaattttgtagtaggcgagactggcgagtacaccagcacctccgaagtctcagtctccatttaatcctgggaagcatgcgaaggcactagtagtaaatgtacgcatttgccctccacggctccacgcctccacccatcactagcctcaccgatcaccacaccgcggcgcggcccggtctatcctgcgcccaccacctgccctgcccgtcctgcccgcgctgcccgcctctctatcctcctctctctctctctagagtgtgaaaagtcttctcctttctctgctccccccttcctcctctgcacctcacctctcctctcatggagttcgcctagttgtgtgctctgctcctccttgaagaagccttcagatctgtggttcctagcctttctcagcttcctcaacacaggtacccccttctcgtccccctctctccctctcttgaaacctccttactcctgcacatctgggaggattacctccttgttctttgttcttgccggtaagcacaatcagttaatcatgcccgttgtctctcttaacacactttaccatacgtatgtcgtgttcagagttcatatgcctgaaaaactctgaaaacttttcttctcttgtgagaactgggataactctcttcttctcgttctgttttttttttatcctgctgttacctgacagagtgacaggtagctgttcgtttgtctcgtcagtatgccttgagttccgacctttctgttatctctgacagttgtagttgttcgtccctagagtggatctttgctaaaattagtttcacgaaatatcggacgcgagcgctttttttgcttgaccttgggaaggaaaaaaaggaaaagaaaaaaaaaactg

SEQ ID NO: 51986 - DNA, 711 bp, Oryza sativa
agtagaaacaaatggaaaagttgtgaatctcgagcaagttgaaggagcaggagaagaacaggttccacaggcaagagcaaagccacagtaagatgaagaatgctaagtgaatcaagttaccagaccgttttgtggcaagtacgcaacaataagttgaagaaagactagcagagtctgaagctgcgaagaagtctgaagatcccttttggtttcgtgtgtgtggtccaccttcgaatctcggggtcgagattcttgtaaggggggtggatctgtaacgctccgcttttcgtgagtcgttaaaaactatttcggcaaaatcctaattgcgaaaattttcgttctttgtgtgcgagtctaagttgtgccaagatctcaattcaaatcctgttgttccctctcatcgaaatcaaaatcctccgcctcaaatctcctctcccaattcaagtctccgaaatctaaatccgaaagtcaatcccttcctttgaatcctcgccaaacacatttccaaatcccaaaatgtccaaacccccgttttgtttccttccttgactcccctatgttcccgagaacaaatacccaagtattccttttgaatctttcccatgacttctccttgaattccccttgatacatccctaaaccctcgagtttgaatatcaaatttgaattcgaacccaaaccctaaatctctccatttctctccaaatcaat

SEQ ID NO: 51987 - DNA, 2031 bp, Oryza sativa
atgattatagaacccagtaactgaaaggcatacattcttaagttttacatatctagagtgcttgtatctattatctaaaaaaaaatctagaatgctactggtattgcagtgtttacctttcggaatgattatagattgaactaagaggatgttcagttgagtatatatctctgtctatttgaaagtaatactccggatttctgatatgatgtatctagctcgaagtttctctggaacgctgtcagtatggaagtctttggcaagtttgaattttagttccagattacacagcttgggctttacataacttttgtgagtgcagtagtgcagggtgaggtgtatacttcatctactacctccatattttaatgtatgacgtcgttgattttttgtccaacgtttgaccattcgtcttattcaaaaaatttatgtaattatcatttattttattatgacttgatttgtcatcaaatgttcttaagcatgacataaatattttcatatttgcacaaaaattttgaataaaacgaatggtcaaacgttggtcgaaaagtcaacggcgtcatacattaaaatacggagggaatattaatatgcacagggataccgagtacacattcacattctccgggagtacagcttctagcctcttaggggagcttgaatttatttcagtacttgtattatgtgaacatgatgtgttgattaaaaaatatataatgctagactattttttggctacaacttcctggatggccaatgtataagaattcgatgcatgatattccagaaatatatccatacctgcaggagggcttgaagggagataagctgctgatcgcgttcctggaggaggatggagaagacgcggcgctccctcatcttgtgcaggatgcccacgctcagcgccgcagcgccgagtgccagcagcagcaggaggaggtaaggaggtggcctcttgttgttgctgcttgccatcgtgtagcctcttgatctgtacttgcttgaatccatgccccctcttattgacacccttccagtatcttgtgctgtttactgcagaatgaggctactactatggcagcaatatgaagaaactgaacttgtctttttggttgcttggattctggaaagaaaagtaacttgcttagtgatggagaaacatggcactgggaggtgcaggctgttagctagcgtatactgctatgcttcacttacttcaaggtgaggcacatgctcttcaaaatttgattatttagtccttatagagattaggagcataaagtttggcacttgacttttgttagtgtctcgtaagacgctggcaatagctaggatgcctgcacttgtatctgatcccagagtaggatgtcttggatcacaaatttattccttggacaaacccacaactttgcatacagtccattgaactcttctttctataggaaagtggtccgtatctttgggatttctaccaaataagcaaataagcaattcatgacaataattttgacaaacgaactgtttacaaaaatggcttcatgagaagaattgttacaaacgaactcaggaagccataatcctcagcaaaaaatatttcgtagagaaacgtggaaaagcatactctaaaatttgatctcaatcgcaaacgagtcctggcaggctggcactctaagcaatatgaattcattatacacaaatatcctccagaatgatgcactgtgagagccatcttggccctatctcttctgaagctacaagctcgtagaactagtgcatcgcttccaagtaagaagtttctaactagtaaaccatacaactcagttctagcccaaatgaactggcaagtcaatggctgaagctagctgtccttgtgaattgtgatgctttggctatctgtccttgggattctttagttcgaagttactctaatcaatgcagcctgctgacctcttcacaactgtgaatatctcgatttctttaaaattttaatactattcatcagttcaaccaaagacgtgcgccatgttt

SEQ ID NO: 51988 - DNA, 704 bp, Oryza sativa
atatctagacaatcaagccgctggatgtttcatagagtggtggatatctcatatcatctaagccaacgtcgttatttaacctaatcggctgccttctggtaacagatgttagccgattgtaggttagatgatgatatcgtcaaggattatgcaagatatatgataactcgacgaattacgtaaacaagactagagtatcataaggatggaagcactaatctcgagaacacaaaccgccataacaagttttacctcttgttgaagatcgaaaccgatgcagctcaacccgaaagcaagaacttgttgaaataaaactaaagcaaaaagggtggcgatgcgccgaaattgtattgaacgtgtgtgttatccattacatagggctcggggcctatttatacccgagaattataagatatgtccatattggacacgactcttatccctaacaaactctaagataccataagtttttgcggcagacttttgcccacatttatctctaaggaatttacataaaatatcctaattaatagatacaattgccttcccaggactctatccatgcgtggcaatcatcttgaagcacatcaattcgaacccgatgtcgtacacaagtcatattatcggaatcggctgtatcacttaacacagtctgactcagacttagccgatctcaatcgtagccgatccggactccagctgat

SEQ ID NO: 51989 - DNA, 739 bp, Oryza sativa
tacaaagagctggagagaaagagcgtttgaactctagagaccctctccctactctttttttttccgtcccttctacgagctcaaatcttctccctcccatttttcttggtaggcatggtcctccttttatatctcaaggggataccacatataccatttctacctacccttcttttgggtggggacccatcctactttgatcaagatttggctcgtacttttgtctgacaccgggatagccctgtcctccctcattaatgggcggagatttgcaatggctgctgtttgaatgaccctccgatgggatgggtcataccaacctccactccgtctgaagcaggtgcaacgtggaagcacggttgtttgccaatgacgcgaccggcgtatgaccagtcacagaccggtcattcttgtccaccacgtgtcagtttagcatgctacacgtctgcccttcttcatacaatagcttccttgcaatgattgcgatgaagcctggaatgtatctggctggggctgacgtgccaactccaggagtccccacgccggctccgactagggacgagtgcctggaggctctcatcattccgacgggacggggcgaggcgtgtgtcaggccgcctgttgccccttaacccgcgatctgaccggtctgtgaccggtcacacactgcgacctgtcacggaccggataagcctgcgctatactgcattaaatgcggcgtgatgcgctcgtccaaccc

SEQ ID NO: 51990 - DNA, 1287 bp, Oryza sativa
tggtgcgcgctaggggaatcctgcccgtcagaaggtcctcggcgaggtcgtccaccaccgcattgacctgtccagcagccgcaggtgaccccaactccctcgccaacgaccggaaacgtgatgctattcccaagcagccggtggctccatcttccacgcagctggctagacattcgccggtcccgtccatcgccgtaggtgaccccaactcccgcctgctttccatgtcggcttggcacctccctgtcccgtccatcgccgttgtttagagaactgctggcggcggcagcagcggactctcggagtagcctaggagtcggttcccatcgaccacacctaggggcgatctgttgtagctgggtctactgatcgatgttgctgtgctggtgctaatgttgatctgctggcctgccgctgctgcttgttgcttctgctactgtgttgaactgatgctgatcctagaagtagccattgctcgtaatggctggctggctgctgcttactggttatgttggtttgcttgctgctttattggactgagataattttctactaaaatgttgttggtgtgatcgcattgaaatacggatgttgtactaatctaatggttgatgttgtactgagatgttttcttacaagtacaaatttagatggtagtttacaaacattgcaggacaaaatatgtagaagtacagtcgtggcgggggagagcaacgttgtgggatgggaggtgaatgcaatcgtgctgacagcaagtgtcgaggctgatcatgatcactgcgggaggaggaaggaaacatatttctgattgtagttttatagggtctacttttcagtcttagagaattaattataggtcatctcttggagagatgattattttcacaccttaaatttcttttaggattctgaaaaaccaaattttgggatgctgttggtgatgctcttataagtctattggaggcctggttttgatcaaattctcaaaatttatgtttttaggaacctattttggagatgctaccttctgcagccaacagatacgtagacgcagtcgttccggtgtgaccaagccgtaacggtaacattatgcgtccgcctttggtccggtgtgacactgtgaccccgccgtaaccccgtaacggtaatattatgcgaccgccaggtggggggccaaaggtcgttccggtgcgacccaaacccggtggagagtcccacacgccaaagccgcagcagcagccgcaacttgcggcggttccaacttccaagcaagcaaagcaacccacc

SEQ ID NO: 51991 - DNA, 890 bp, Oryza sativa
acattatggagatcagaaagaatcacaaagcagaagttccttgctttgactttgagaagtgcaaaagaaagaaattcgaggagcttcaagtctctgaggaatgtggagtggtaaaatacataaccatctttctctttcatattttcattgacatacattttgttatggttcagaagggacccagtatttttcatttctgggtaatattcttggtttggtaactaccatgtcacatatggaggggggttatttttatactacaatattcgttgttgcttaagaagctgtaatcccacatgatgtaatacatactatgttacttggactgtccatttttctgtcccctttctcctcccaactcatcatctccttcactgtctattgaaaccatacctctcctcttatggtgtcctaatactctatcagccttcctcaatcacttttgacctcactagggatcaccatgactccatgagaatgtacacaatcaaggtgtgcgaaagcagaatcttgtgatggagttcttgggctacttggaaacatcaatttagctctgagatcatttattgggttcaacagaagtcagaatatcagagcacgccgtttgagcaggatgctggtgcataatagaaaaagggcggaccggctgacctgctttgccagtcagctggatactgcaggactggatgtttatgttgtatgcatatttcctttgaacacatcagcgtagtagtttagatggccattgaaacaagtgggaaaaccattttttcgcatatatttggaacactgtgctcttgagccttagcaagaggcgtttctagacccaacggccatatcttagctggactccaagagaactgcggcctgtgtgttctcaataagttgct

SEQ ID NO: 51992 - DNA, 592 bp, Oryza sativa
tatcgccaacaaatcgtgcaatcttttcgctgaaagaagctcgtattgtactagcagaggagtagaagttagtaagcaggaactatatgtctaatgatcctgcaagttttctttgttggagtgaaacgactttgtaaagccaggctgatttttataaggttcttcagagaaaaggggaaaaaggaagcctaggtctatgctgttttttgactgaatgttgtggtatgagaaagaaaaggtcgtcttgggcaacacaacacgcacgcaggctaaaagtgtctcattgtctgaactctgaataacctgggcaacacaacacacacacgcacgcacgcaggctaacctgaagaaaagaacaagcccacagtctgttgttctcgagtgaatatattatttttaatacaatgttttattgagtgaatgttaagcaatcgttttcctagatgtccagactcttctgatagtgttcttcgaccaagcaaagaacaatacctagcatcttttttcccttatgctctcatctttgttattaggttggtgatgtatccacctccccggttgttcagcgaaaaaccgtgatgtctccgttaag

SEQ ID NO: 51993 - DNA, 4693 bp, Oryza sativa
ctacaaacactcttaagccattatgtggctttctacgaacgctcatacatcgtcatgtgatgcgataaaaaattagagaattctaagaaaaaggtaaaacatctaatacttaaactctggattcgttattttggaccattagattattattagatccattaaaatataatctctcacttctaatatacatttctatacgagagaaaatacgtaagtactatccatctgaaagaagatcgaaataaaaaacataaaaaatcagaaaaattacagattgaaaagaaaaattaacagctaacatataaaacgtccaatccggtaaaatctgctcactgctcaagcatgtatatgcagcatctgttcttttttttcgtaagttgttgagagctaaagcatatataataaaatattaaaagcatttgatctatatcaccaattaaatatagacttctatggttacatttatcgatgtcctcttcatggagagttacatgcatgcgtgcatccttgcatgtattaacttttaaaaaatatatgttggttttatgctcaggttaattcttttattcctgacaatctacccatctatctatcaattatatactgaaagtccaataaacttcgtataaacggtactaatccaccgcatagcatctctataaacggttctaagccgccacatagcatctctataaacgcttttaagctgccacgtgacgctataataaatcacataaattctaagaaaaaaagcatttaactattgattttcatttattttggtagactattgttttatccattacatctatcttaaaaaactaccaattaaattatctctaaaagtccccacttcaaggtgcacataagtatgtacccacgccggtccgatgttcctctctttcatttttttttgtgaaatccaaaaggcaatacaccgttaaaaagtttgtactcagctcaaaagtatagttgggatttaaaattaaaattcaaagctcctttagattataggaaaaaaagtatgcgattgggattcctattgattgcatcttttgatttgcacgaatacattatagtaagtctgatgaaaaattcaaatcctatcgataccatgcaaaaataaacatagaaaagttaaagtccattaaacatcttatgaacactcttaaattcatacatgatactataataaattagataaaatcatagaaattatgagaaaaagataaaatattacatgtttagtagtccgggaaacgttctcactataaactagatgggtaccccgcacattgctgcgggagatttgtgtgataaaatagtagatatgagctgtagaaaaaaaaatcttatttactatatgattttctttcatgtgcttgtatattttgtactttgatcaattattgaaaagttataaatggttgagttgtatggtgtggcttttggggagaagaaatgcaatttgcacccttgatgaatcatccaagggctaaaaacaattaagatgatgtggcttcatgagagaagagagaattagcattagctgcacttagtgggatgaactttacagatatattggacaagggagtaccaatccgataagctatttagaaagctactaaaacgcttaaacgcttaatatgtatactatcaattataacttatgaggtatatccacactaccactatctgctaatccccaaatcatattgcttacgaggtatccatgcacggtgcacctaacgattagctgatatccaaaaagttgcggtatatctcaatggcaataaaattaataaaatagaaataagatgcatgcgcatgtttttttccttcgcatgggatcgagaaaatcaagctgctgatgcaaaggttgtttggttaactgcagtttatttatgcaatgaaagatgatgatttcatctatgtgggttaacaaattttaacattcatattattgctgtactctgtaaaaaattcgtttactgtccaaaattcatttattcgttgtttcacacatgcatttctaacatgtttctgacttatatatttttttcaatcatgtgttggaaagaaccttcaaattctttcaccgagagacaaaagtcatgatattcaaaatcctaataacaaaaattatgatagtttaaataagatgcccgcgcaactgcgcgggctaccttcctagttggataaaaaatggtcgaagctgaaattttagtaacaaaagttgatccaaaccataattcactatatatatatatttaaataaggggtattatttatacttctttgaaacagaggagtggtggtggtttcgccacccccaacctcaccaactgcctactatttgctatactatttttaaatgttggtaatagtggtgacactgaatctatcaccatcacgtgtttcacctttgtatggaccctataatgttggtgaaacttttttgcttctcctatgattaatcaaacagaaatagctctatgcctctactctagctaattcagtaagcatcaaaaactcatggtgaagtatagcttgataggtagatagttttaggatttaaaaatgaatgcaaaagtttattttctaaaaattcagtagtaacgcacgagcaaatcagctagtaacatacggggttagagagcttacatgtggtgaaattgtgggtaataaacagaatgcatcacatcgtggagatggttaacaactagcaaatataaacttactaccatgtattagcactttatgtctggtcccatctattttttaattgtagcatgactcatgtttgaagaatttttcagatgggtcccaccttattatctactttacacatatatatattgtggtgcctcttcatcctactattaccacatggcacgagtctaccttactacctagtttacaataaacattgaggatgtctaaagaaaaaaaaagtcatgggaccaaagaatcgacatgtcagtaataaatatatataaaaagaaaataatggcaacaacatactaacattacttctcttttacataaaattttgttgcaaaacacagtgacacggataaaaaggagtacaccataagtatataacctaacatagagttactttctccgtttcacaatgtaagttattttagcatttcctacattcgtattgatgttaatgaatctagatagatatatatgtctaaatttattaacattagcatgaatgtgggaaatgctagaatgacttacattgtgaaacggagggagtattagctagtcatcatttgttctcttcaccgaccgaccggttgggtcaacctttctatgtacgctcttatacacgatgtcgtcattatgtgattaacacaagaacgcttgttcgtccctcgcctacaatgaaaacagaaactacaggacgcaggtgactagctctgcgtgtcgccatggtcgcgacaccatgttattttcattaccacagaacaagcatttatatgcatatatatgcccgcattttgccattcatcctccacctctcgccgccaagcagcttcaacaacagcagaagggcagacgtgagaacgatatatacatatatccaacatgcagaggaagtcgagcggcggcggcggcggcggcagcggcatgtgcgacctgccgatggactgcatcgcgtgcattgcctcgctgacgtcgcccggcgacgcgtgccggctggcggcggcggccgcggcgctccggccggtggccgactcggatgacgtgtgggggagcttcctcccgccggagtgggccggcgacggcgacgccctggacggtaagccggggggccgcgagggggagagcaagaaggagatgttcctccgcctctgcgacttgcctgtccttctcgacggcggcaagctggtaatcaaaagccatttaattccttatctgcgttgtttgttaattctttttttttacctttggttccataattattgaagttttgaacacggtttggtcaaacatttataattttgactatcaataattttataaatatttagtttataaaggcacttgagcaatatatatagtagtactatataaaaataaaaatgtatttatttattctatataatataatagaaaaacatagttaaatatatattttagaaactatgtcattgttcaaaacattaggccatttccaatccaatgactagaatggtgtcatagcattaaataaactgccacctaggataaaaaatgaggtgacaagtgaataaatgaggaaagagaaggaaaccacgtcttgcatgggacatagtttctacacaacatccaagacatcatgtgagataagtagcattaaacttaagtatggaatagtgatgtttggaagagtagtgtctagtattagtttcttaattatgtgaagtttatggaaactatatctagtgtcttgggttgggaatagccttatggaaccaaaactagagggaggaagtactatgtactactattgcctcttttgtagggcctgttaagatcaatttgctgtggtaaatttttttggtaaaagttttggtggcaaaagatttggcattgaagtttgttagttggtgtctagatgacttagatgcatggtaaagttttaccattttactagtaaagacagatagagcaatgctcccaacgtattttttgg

SEQ ID NO: 51994 - DNA, 3106 bp, Oryza sativa
attgggaagagtatgggggaactgttggtgatgctctaaacatggctcctaaaatttacgcacacccaaaaccagcaccaatcataactagatgttgggcaacttgacgcgctcccaatcgcagaaatcgtgtgtggtcgcgccaatttttctttccctccccatgctttccccaaccgcgacagctatttccccgaaacaaatcgccctctttcgttcgtcgcccgctaggtcgagaggagccacgtcaccttcccctcctcgcaccagctccgttgtcagctccatctaggtcactgtcggcccgacatccatagcgccaccgacctctaaccaggttgccatcgactgtccatctagggcgttgccgaccctccatctagggtgccaccgtccgtcgatctaggacaccgttgcccgcccatccaagtcgccgtcggggccatcatcatccacttcattggcatcatcggtagtctctgcctcttcggccacctcgatgacgtgtgctgctactgaatttttaggtaatttcagagtaatagatcatttcttttctctttctctccatggatctaactccctttgagttcaattgaggttgactcatatatatataggtagtgcatcatgcacagtagtcatttcttgttgaatgatgcagtgcaagtgttgctgtgatgatctaggtaggtgctaaaaagaagtaatgataaaatcatttgttcttaatctacaccctaaagttttattaatgaattgtactgaaactatattttattcaactagacaaatggtacatgctagtttcctatactttaccgagattttatttttgtattggtatagttgacatttttttttgcctaaactagtataccagctgcatttctcttctgcacaaaatagtcatcgtgatcctttattgcattcattgtgcagagaaatagaggtcggttcattctattcctaccaagtataactaatgagagacatagcatatagctaagataaatcaaaaaaaattggcttaatacaattccgcgcttgaataaaactggaccgtaggtaggattatcctctcaagtgtgtgcttctctgttgcgatcaatcgattcatgacccatgatagaaccgccatgttttggtgcattgacagagtgccaatagctatgcacaatttgcgttgcggccaaaaaaaattcatcgtcgttgtcggagatgattcctccacaagccgtcgaaacgagaagcaaggactactcatcatggatcaaatcaactgccaaaccattattcatcacaacaaaaataagtttttcccctagcgaaattgtcggatcaaattaaaaaaagggacatggttgaaagaagaaagtcctaacatgagggtcgcctaggatattaacatgcagattgatgatacggtcgtgcagaggatcagctaagtcttccgtttttccacattagaggcgaaatatttcgtcaataccactgtggctggtaagagattctctagtggcagcaggagccagtgtcgtcagaaagggcagcggcaagataaggagagatatgatccatgcgtatgttaaaaaaaagggtaactgttaacgacagaattttgcataagatttggagaggaagaagaaagatcgagacggatttggtgtggaatcgagttgatctccaagtcaggctgcacatcggctgagtgtcgtatcggctggaaaaagaacaaaggcttaacttggccgatatggcaagtagacgatagatataacttgggctcagcagggcctagattgaggtaacagtcattgccaattagagatagagcttaaataaggcaattgtatctattagttaggttagtttaagtcggttgtgattagttttggtaagagaccactgtatatggtcttgtttgtattttatctttagaaaatttgagtcgtgtccataatggactaagtttgtactcggggtataaatatgaaccccatagctatgtaatataggagataatctaatacaacttcggcacattgccaccctttttgtttttacttttcgacgactttgcttcgcaagaggtaacacgtctcaatggcttgtgctattggggctattatgtccctttagatgttttaatccttttatcatgatcatcttctatcatatgtcttagctaatctagtcttagtatctagatttatctctatcgggtggttctcgctttagggttcttgccggtatcggctaaatattcctattagattatattagttaagacatctaccatcctgaaaagtaaatatttacttgattgtttagactctagttttttttatctactttgcgatgcatcatccctagtcttttatcgaaccctagaaactaacctagaaacaattataattaaggatagtattggagtttcagccgatcctacctaatatacatgcttctttaccaagttttatgtaatttatcacttatatagatagatcactctatatagttatatcaaggtaaatcggtatcggctgtgctatctaaactattaaccgatcacagtttgatatttttatatagattgatttgcctatataagtttgtactagagtattagctggtacattatatttttcttgctctaaatgttgttctatcggctatttacatgataccgtttgaagtctatttatcaaacccaaacaaatgatattatagccgatgagacatgtttagggtttattatgttctatcttaccaagtccatagccgatctggtctaactatatcggctgagaccaccaacaataccctattggcctatcagtcgatcggctatcggttgactaattgtagcacgagttccaatatagtatgtaagagagatgggtggattagatattaatgatgcagtatatatctataactaactattgtataagtggctattagattggctatatatgatatttcaattttgggagctagtagatggctatattattaaacttgctctaatctcacctcttcgtctgtctagatttttaccccagctagtgaaatgcctctaatttgttgtggaattaagaaa

SEQ ID NO: 51995 - DNA, 812 bp, Oryza sativa
gaggtgcacaatcatggatctggatttttacaccttgagggcatgtgccccgtaatctccaaacctctcaaatatcaattaaataattgaaaaatattcaaatattaaatttaatttatcatttcagaacatttcaatttgaaactcagatgtgtatatgaagaaacagaagaatgactccacccttgcatagcatgagcaattcatagctatattttgtttcacttatgacttgacaatttgtgcctttaacttcattcaaaattttcatgactatttggatggcatgcaaagcatgaaggcacatgctcttaaggtgtaaaaggacctttcccaaaatcatgcaaaattggttcattgtgaaatgtgaatatgtcgtcagcgtatatgaaaattaattattctacatgcatactgacacctgcattattttctttttcccttcaaatgtcccttaaatgatagcttaagtcataaacttcatttgtgcagacacttgaatccttcttagaggagactcttgacgcgataccaaactctgtccttgacgcaccaataggtaaggaggcatacatcgaggagggacattttgctgatatggattcattattgccgcctagatattcatcactgaccaacggtagctgtgaaattccagcacttgtaactgcatccacctgaccaccatattttccgtggagatgctaaaatttactgaaaaaaaaagataagcctgcaagattactgttataatacagacccctcctgggttagattagatacgcgggaacactattgattgtaagttgaaa

SEQ ID NO: 51996 - DNA, 716 bp, Oryza sativa
tagaagctgcgtcgaattcctgcagcccttaaatgcaaaatgtgacggactgacaggtgctgaaacagaaaaatgagatggggatatggcttgcgttgtgtgaggcatatccctagctgagtgcttaatcacttttgctatgggggtgcaccctacattgggcatgtcctaataaatgttatgcttgttgagttttagatgtttaatgggcattagctttatggaaagaagagataggaagtcaaaggtcttattggtctttcttgccctatgtgaatatgagacaattttggaaagtgaataattcactattgaaagtgcaagtcgatgttccagatatgaaagtggagtgaaatatggatatgaaggttcaagtccagctccaatctaggtataaaagtgttcttctctttagtccgcttttatttttttctttcttgggagtcttaagataggactggaaatcgtgttttttgaatatctctgttccggcaaaagaagtaagtttgttcgagatcgaaagagtgccctcgggagactagactgatagtaacagtagcgcgctttcaattgaggagagctgttcacaagtagtggttttgagctctttcttgttgaggttcagaataggtaattccttcacttcagttgcactagtggattgaataactgtttagcatttttccacttatccaattctttgcaagagtattaga

SEQ ID NO: 51997 - DNA, 865 bp, Oryza sativa
gggagagtgggggaaaaagtggaggaggtggaggggatcgattccacgcgctcgtggggcggggtgaagcgcgggaaccgcggcgtcgtggggcgaaaccggcggccatggcggccgttggggcgacgggaggttggggaagaagatgacaggtggggcctcgggtcccacctgtcggggagagagaggggaaaacgggcgagggaggtaaagcagacttgagggagagagagagccgagcgggccgagggaggaggccggcccgagagggagagaaaaggggcgcgcgggccgcgggagggtaggaagacttgggccgaaaaaggcccaaagagaggaagggggattttaattgtttttctttttattttaattgatgcaatgatctttgtgctattaaaactatttctcgagctccgaaaattcacggaaaattccggagagtacattagggcgcaaagaatattacaaaatattcccggccaatgatttttaaaggaaaatttcaaatttcctctataattccacttgattaaattggtttaacttttatttaatttctagaaaatgtattattaattgatttttattcccgaacgaaaatcggggcgttacaaatctaccccccttacaggaatctcgtcccgagattctgggatggctagaaagaaagctggagctggcgggcggtttgactgatcggacggatccgcatactgcactgccccctttctgtctcgaactgactgattgactgattgtccagacttgcacgactgaactgattgattcaacttttctgttcctttgctttgcaagactggactgactggttctacttcaactgacccagacagggctgtgg

SEQ ID NO: 51998 - DNA, 1364 bp, Oryza sativa
gccgatcgggtatagactgacttaataaggttgttctccctaatgggtgcaggatcaaactaggtggcacggccttgacacacttaagggtaaccttggacctacattagagttaagtagatatcctaggccgtcgtgttttttgttaacaagtggccgccgccagcgatgacctccctcccttgtcacttccccatcctcacttcccttcctcctcgatgtcttcttttccaagatttgctacaaagaacatcacatgatgttgttttgtttgttcggtaaattctagcacagtagaaaattttctgatatgagcaagtatttattggataagtgaatctacaactgagttaattgagcaagacttacaaagtccatggagcatctgaagtttttttatgctgttgattgatctgattctgctgaatttttttgctgttgtctgatgatctgtggtggagtggttatggtgtgtaggaaataaacaacagcaatgtaaaaggaggaagcataactgtatgctcatcaactactgattataattcattcattcctctgtatttggtacaagaggggtaacctcaccaactctatctatagaggtatctctatctagctattttaccttcacttctctatccaaacaagtgataggaccattctatccctttttatccctcaaacaaaaaagaaacatggttcattccatttctcgaaccaaacaagaaaatagaaccatcctatctatcagggatggactcaaccaatcccatctactccctccgttgcaggttataagatgttttgactttggtcaaagtcaaactatttcaaatttaacaaaatttatagaaattttttttttcagctcaacacaaatttattatgaaaatatattcgactattgatttaatgaaactaatttggtattataaatattactatatttgttcataaacttaattaaatttaaaatagttcgagtttagttaaactaaagttaaaacgttttatagaaacggatggagtaattctcaaaccaaacacatgcctagagctgccaattccatatgggtcggctcaattcctagccgttgcgatccgttgcgaacttgcgacagactactcgtcggctcaattcctagccgttgccatatactactccgtatgtggatgtggcccccattggccagtgacccaatatatggaaacctaactgcatccaccattccaccgtcatcctcgccgtccccttcttctgcgccgccgccgccgccgccgccgccgccggagggcggtgccgcccctctcttcctctctcgtcaacgcagcagcaaaagctagcgtgcgccgccggcacgcaa

SEQ ID NO: 51999 - DNA, 1090 bp, Oryza sativa
ttcctgcagcccgatttagatcacttggcactgatcaatggaagtatactaactaattcctgaaacagccacatgcataatgttgtgatggttatatgcactgcgtagtgtgtaagacaacttgttttcttgatgttactattgctatatacaataatttcgttgttgtttcattttttgctacctcttaccagttctgtgtatgtgttacaacgttacactttcaaattttacagctatttagttaaacacttatttatattcattttcttcttttacatctctttaagtgaattttcatattatgccctgaaatcccaacttcaatctgaatacagctatttttcttggtctatgcaatgactctgcactggctcaggatgattcagctggtctaggagctacaagaaatgagcaaactgaggaaaacgctacaggtttacagcgaatcgaagatggctcagtggtctcaaatgaacacactgtcaaatggagaatcttcactgataatgctcgagattttttactgaaagcaagtaactcataacctgtagatttattcaaaccaccttttgtctctaacttacttttatactgttttaccgtttattctaagcaatagatctttctaaagaacagaacagcaatcctattagatatatataacagaacaacaatcctattgtatagtccagaaggtggttgatttttcagtgaatcaatttgtactcgttccacactttccggtcacctgctgatactgccagtaggatgacatcatcagaaaccttggatatgcacttctagttttcctattaagctatttatcgcttcacatatgtattccacaaccataatgttaggaaaataatttgcttttgctcgagagcttggttcagcacttccttccctgacagggaacttatgtgtttattattggatggggagaacaaggataacttgtatccatgtgccggaccttcattctgcatttctgcttggtggagaacctaccaagcatataacatggatctcctatcctgcggaaaggaaaaagaatttcacattcttcctttcaggatgggaggat

SEQ ID NO: 52000 - DNA, 2303 bp, Oryza sativa
ttgttagtttggttatttactgaagactaatatgctctttaatccataatataaccttgagttttacaaagttgaatggccttgctttgctttgaataaataaataaacaaattcatatacacatgcacattgaatcggcaacttatttgttgtggtgcttggttttctccgtgacctcattctgttgttatccttagaagagctgcatgttagttgccatcgctccttcaccatgctcaacgctagttacatgctagcttcaccactttgccctgaaccataatttggtctaaagttattttgtttattgggatacattttattatatttttgattttttttgttaagatatactccccctgttgtcttttaaccgttgttaggacaaggacattgtctccagggcattacttttcctattttatattcataaaaatattaaagatataaactgcatggaagggattcgaatgaggtcattatcagataccaaatcttaatgttgttacacatgttaatgagttaagatttcgaggttttactgcaccacgttctagggcatcatctatttgagaacacagggaggtggaagggggaggtcagagggatgaacgaaccattatcaccaacacaaatatttatagtaacataattgataataggtatacattcttgctcttcttgagtacttgttgagggtctcagtatagtttcgcctttctcctgaacatgttggtgattttacatctagggatagcatattccaaattgcttagggttacttactaatagttaaaattacatggtaatatcaattgccatgtggctatctgatcttggttgaagagagcataacacacacagatgtcagcttacattcacttagctgaagcagattattgatgcaaggacaatggtggggaaaaagagggagttgatgaggaggattaggatctagtaccatgatatgttttgccacccacaactactcttcattctgtttgcgctaatcacactcaagttaaatgggccaggtgtagacagggctatgtatatgtcaatactattaacaccgcaaacaattaatactaggctggatggagccaaatattttaataaattgttactcccaaattttgcaggctgagttttataggttaaagaaagaatacgagaaggctgagctattgtatctggaagcaattgaaatcctggaagaatcatttggatcggacgatataaggtacatttggatcttctttttctgctatcattcattatgggtagactgcaaatgttgtattatcaacttggagtattcactaatgttaccactgtaactaaactttatgccagtatagaatggtgagaaaattaggtataaccagtacagtactacccaaatcctatgcaccattaaaacaactagttgataccccgcgctttgctgcgggatatgtggatgaatgcatgttatacattctagaaatgatagatgtacatgtttaaataatgtgaaaatgataatgatttgacattggttgcatattgagttctaaaaatacaacaaaattgtaaatgatatgttatatttgcatgatatttaaaatactatagataataattgctagtgggtgatgacgtagcacacttgcatgtgatttaaaatactctagataataattgctagtgggtgatgatgtggcatacttgcatgttgatctttagaagttagtgggcatcaactttatagtaaaataggattaggtccactttaatcgaaacttttcaagttctctcactttatcattcctgttgctcctgtcaaatcgcccaactggcactaaacaccagattcttcttgatctcctccctgcctctggttggtagacaacccccagatgcacctcatgctgagttcccagccccttcctgtctagatccgtcctggagcttctctcccaactccagtaccaggcataaggggtgccgctggtggttctaattataatgaatccaaacactaattctaattaatcaatcagcgatttacaacaatctaagttcaaactaaatcaaatcaacacaacctgatcatgctgagcatgttacataaaaaaccatatcatactccagaaagaatcttcattacagctgcatgtgaacaattagattcattgtaaacatggttttaaaacgttgcctaggtgtctgggtatgctgagaggtcagggtgtcgcctctggcttcccttcttcacatggagcgtatgcttcccatgataaatcatgtgaaatcgagg

SEQ ID NO: 52001 - DNA, 846 bp, Oryza sativa
gttctcaatgagttcctgtatcggtcacttcctttggttggttagctgctcctaggagtaatctgttgcgcgtcgctttttgtgatgcctttttctttctagagggttccttcttcgtggaccgctttgttgtacgtatttctgcttcttaatgaaatgaagcattttcgagaaaaaaaaatgaagaactgggagggaaaatctagtgccaactaaaaatagtggcatatagtcaatggaattccacctgtttggtgaataatgttgttttggtgttgtgaccttttcctaaatatgcgataataatatcttatgttgaatcgcggtgttaaatgaattccatatgcaaaatattctatacgtagcaaacagaatatcagagtgaggtacatgtttaaaacttcaaacggcttcttcaaatcaagaattagtgagggcatctttctttttgtagtaagcaactctattgaagataacataaaattgtaaaaacagggtattgtagttagttattttaattcttctacttattctgtactggaaactatatgatgtggttgatagctgttatacttgactgtgagtgctgtacaagaaaaaaaatcaattagatttgatgtagcgaatacacatataaaatttgatttgatattaacctttattttgggtattttgaaccaatcaacctcaaatttcagtgataacattgtttcttatcttactcttttggactactaggtaatcttcgaaggtgtctatgctttgcatcctgctataaggaaatcactggatttatggattgcagttgtaagattttttaccctcaaaaaaaagttgtaagatttt

SEQ ID NO: 52002 - DNA, 6283 bp, Oryza sativa
ttatggcaactaaaaaggtagcccgcgcattcgcgcgggtttgtactatacgtaggataaatttgagaaacttataaatatgttataccagcgaaataatatctgcaacgtttcaaaattgtgtttttttcatgaattttcttcattagaattgcatgacgaatttaattgttattatttataaaattacctattggagattagggttggtaacttacggtataaaacggtacctaagacatatgactcttgaggttccatagagaaagagagaaaacttaagtaataaaagacattgcatacacaaccatatataattaatggctctactgatttatattgaaaaattgataattaatttattaaacataatatatgaccctcgattttagaccattatttctaaccattggatatgtagatgatctaacatattgtgcagtatccaactaaccaaattattcgtcttccctcaccacggacggtggacatgttaattcgtgcctccgacaacatactcgcatcatcatacttagaagaaaaaataagtgccctgcatgtatatgcataatacatgtaactatctcaagcccctcttttcatctgagaaaaatattctatacccatgcatgcacaccgggatgcaccggctagccctgcaatttgttcactccatgaacagtatgttcctttgttctagtgattagataatttaataagtacaataagtatctgaaatcaattcttattagtaaaatgtacaataaggacagctctgtagacgccatctctccttcttttcttggtgtattagttggatttgagcaacgtgatataggtattttgggctataagttaatgtccaacttccaagggattaagtttcccaaccctcaacgccgaactcagcataagatcgttcgtttatccttaaaaaagattatatcttttatcaaggcattgggattaagtaaatagcatccacataaacgttgagagatataattaagttggttatgagtcaataggtccattgatgctataattaaggttaaggttaatggtttataggttattttgattttattaaaaaaataaggtggatattttgatttttaataagaacttttagtattttttttggtatggatgtgggtccaaaatataataattttattagcaattaaatatagtcggtatagatattaaactattgatttaattaaaaaaatacaatggttcaaacagatcataaattgaatatataatttaaaatttacagctattgaagatcctcatacataccaagatcaatatgtatgaggtatattatctatatctatatgtgcaagtgcatgcagtctttgaaagtacgatgaaattaacttaattaccttagaaaaaaaaagggtggcgagcaagaaaaaaaaatcacacagactcttatcatgcgtatggatggaaacatgtacgtgcgttgggcggactcgtaccaccagattgatcttaagtttgttactaaagataaatctaatggtatatgatggtaaaaaaaaatattaggtccatgagattaaataaaaccaatggttcgatgttctcctttttccatagattttctaggaattaattagagcgtcatgtgtcaatgtgtcatctttggaccatttctaggaatctcacgtggcagtttaggagcgtttttagaatatttaatggactcgggtttgtgaaatttactccataatatatattgccatttttaatattttgtttttatttggttgtcatgcaaagaaaaatggtatatattcaaagttaggaaagtgtttttcttaaatataaatttgataggttcaccagtttaaaccatctatatacctaaatctaatggtttttattgtttgttcatatttggttttcatgcaaagcacaatagtctatggtaaaatttaaggaagtgtttcttttatatatagattaatgggttcactggtttaaataatcgttaaaataatttttttcagggacaatggttaaaataattggttaagagcgtttgttagagtggcatgtgacggcttaagagcgtttctaggatgccacgtgacaacttacgagtgtttgtagaaagtttcgtggacttttaattaatacaaatctaataatgacataaaatattgtgttcattgatcttagtggaaaccaatggttggatgtttctctaatttaagagtgccacacaatggttaaaaacattgatatgatacttaatggactttaacgcgtttgatgtctacttgtgggggtattcttttcgataaagataagttcaattttaattgtgattagaaaaaggaaagaaaggaacaaaggaaaaaaaaagagagaacagacggatggagtagtacgtgcgtactgcacggaggtggggccggtgggaggttttggttttgaagatagatctaacgatgtaaaatagtgggtccaccgatttaaatgaaaatcaatggttagatttctctattttattagagtgccacgtggcaaagagcgttttgagagagccacgtggcagcttgagagcgtttatagggagtttaattaatggacttttagaatatactccctccattccaaattgatctacatataattttttttgagcttatttctaaatgatctacatatttgtgttcattcattaggtctattcgttatttgtgtattggagtaaatgaacattgatgcatccatgcacacaagtatttataacctacatgtaatatcttgatttgctattggctaggaaataatggggatggtgcatgcatcgagtttgttgctagaataaatatagtatgagagagttattagcttttcttagttttgatgtacctataaaatatatagattaatttagaatggagggaataatagatagacagatagatagatagatagatagatagatagatagattttcaacacggagtagggcacacccaacgaaaatttcctgtcctgaagccgccattgcttgaggccttggattaattggattattgacaagttaaactcagactgagttaacatcttcaccacctccttacaattttgtctcagttatcaccctttctgcccccagttcatttgcaagctcagcagctcttttgcacgccaacacctcactaacaaggacactgattttgcactttaaacacataccttctctatcccataaaaaaccaatcctaactacgaacctgaacacatgtgtgtccaaattcattattaggattggtcttttcttttttgacgaagtagtatttatttagtttgttcagtgtattatcattcgagatccaataagcatgcactgtttcggtcatgtatttgttgcgtgatcgatcgatcgattcatgtactagatgcaggaccacatttttttggccgtaccaaatctgataaggttttgtacctttggattgggtctgctgattagttatccatctcaccatttcttcaggattcatcatcattcgttttcaattcgttggtaccaccacacaccacactgttacacacaaatcgcacgcctccccactaatccatgaccaatcatctcaacatgtactaaccatttgatcttgttggaaacacacatctcttttcataaattcggaatgctaatcatatccaacatgctaacctgcttcatgcttcaattttcacgaaattgctttcctgccaacaaatgggggtgagtgctgtttgtgtttggcaacttggatagtagtacaattatctgcagctaaagaagctagttgcaggtgttaattcactatcaaacgccatcaacttctttgcctgatactgacggggactttgcaacgtaatcagatcgaaggaaaatataaactcttgtagttatcgatggcacgagcaaaattatctaaaactatctaacacaaaaccatgtgcattctctctgctttatgtacatcaattaattagccgaatgaaagctagctagaccgaggcaccgagctagaaacaaaaaaaggtttattcggtgacaaatgcagaaggatcctagtgcatttatttttgaacaacttgctgtaattaaaggttagaatgactgcaattaattagtaaatttctatgtatgaaattcaactagtgatgcaagtggcactgaatcttgaattgcgtcaatcctttttatctgaatctatctactagccactagtgaaggttcatagtggagtccagaaatgcaaaaaatatatccttgggtgcattattatactccaccgattgcatgattttttaccagtggtgtttggtcggttacagttcacaagagtagctgagacagtcagtcagtgcgctcattggctgtcaaaaaagctctctgcatacatgtaagcttctagagtatatggcacactctaactacttgcacccaaatttgatactagacgtctgtcatcccaatatatatactaacttgttcagatacataaatatattttgagacagatgtggtactgaaaagtatggttcttaaagtgcgtggtataatgtttcacctaaatttttttcgtcgctgataatcgtttcttagtagtatactcgtgccttcatgttcttgggagatcatagaagcactattcataattaactagggaaactatcgactctttagcaaagggagagcaaacagcttttgatgtgaattcttttttcttaaaaaaacacttggtataaattcttaaagaaatactagtagaacttttaatgtgaaatcttgaaaagagaacaacttttgatgtgaacaaactgtaacatgtgcataaaagaatactaattaataaagagtagcgcaaaagaaaactaaagaaagaacactacttaaccattggatatattcagatatatatatctgatatctgaaaaagacaacaaaaggacaggaagtgcaacgtcagaaaggcaaatatattcagaatatgtataatgctggcgccgtcttcaggggagaaagaaactattctgagtgcgatcgaatatctgaaaattcttgaacacttgcacacttgcttgactgactgcctcctttaattcgatcccagctagtggacacatctgcgatttggatcattctcagacactctgagtggccggccacctgcaaattctgcaaattgcatgaaaagatatggttttcttggaattccgttttgtttggttcggtgaatttggagctctatatgtctgtgcttttggaatatagaatatggttttcggaattccgtgtgctcattcagtgaatttggattggtcctattataatcttttgacgatgcgccgcttcgacctgttgcatcagaaatcgaaacctctgactgaatttcgtacaaatctaaggcttgggtgggacatataagcatcgcaaaatgaacaggttcagaggaatgttggcccttagtcatcattccatcaacatcgtttgccaccggacaccttgatggatctctcatgacaaatcattggtaacaacttgttgattgttggtacttgtatagtcatcattgtagttcttcgatttaagcatgatctttgattttcattttggttcgtctatattgattgatttatgtctcaacttgtggtcaccatgatgcaggctagtctagtcatcctggccagcaggtgaagagttgctctgggaatggatggaccactgatcgatcgatgctgccactgtagatcgaatactgtctggatcgatcgatcgatagatgcatcgacacaacaacaacaacatcagctcatacagtcacagcacactgcagcattagctagagagaataaaacagtacatggattggaacatgtgcagacaatatgatccatgagtgtccattcgatccattgagcatttgcaggcagctggtgcttaatatatttgccttttcatcatcatcgtccgatcgatcgacgcatgactaccggtttcagaaatggtggattgatcgatcggtgatgatggttgttggagatgacggtggtgatgaactactgatgatcaacttgcattgctgccgagatggagatgtgtggacgtactatacgtgagatggatagatactggtagaaatacgagatctgcctgatatgaaaatctgaaatggcatcgcatatgcctgctgctgcttctgaatgccggctttggtggacaactttatgagtcagaccggtgtcatatgtgcac

SEQ ID NO: 52003 - DNA, 2493 bp, Oryza sativa
taaggcgatccgggccgttggattttgatcgatcggctccgggtggcccagggcggagcgtgcaggcggattcggcgacgccaagcattattctgttttgatgactatgctgtaaatgttggatatgctcctccatataccagttcagacttcagagacgaaaattagtactctgtatatataatttgtattagttaaaaatagaatctttatcggtatttttattttttttcttcagtcactttactctattatattaaatcttgtttgtaatcgaccgacgaccatctctctatctataagtgtgcctctaatccatttattcatgtctctaatactactactcaccgttgctcactgctcctctttctctcctaccacacaaatgtggccagggacggagctagaacgaaatggagggtatcacttgcttaatttactttaactttagatcaagtttaaactgatttaggtgtctaagtttgtattgagggagtgcacacatggtaaaaataggtgagattcagctaaattttttttaccgggttcctgggcaccccctcacatactctaccttcacccctgagtatcgtgatacaactaatagccgctcgtcctcaccgataagggtggcgcaacttcaaacattagcacgtccataaagctttaaagtttagtagtttggattgttgccatgaggtatatgttgggagcagagtgaccttctatctattttatcttggtccctattcccaataacaaaaaatgcacatggagaataggggatggtggcaaggtgcatatttgaagagatcagtggatcccaggggccgctaggctaaatgttatgggcaagaaagagaaatcaagattaaagttacagatgaaatcctaataatcaagctttcaccctgaatatctgaacattttgttgcctggcattacgagaaaaatggtatctcagtgcacagtgcttataaattgacgctaacagaaatagaactaaaagagggaaattcttctagcaacactaataacgggagtagatattataggtccatgatctggatagcaaacgtgccccagaaagttagagtgttcgtttggcgcctcgcacgagaaaatctgcctactcaggctaataagtttcaacggcaattagtgacatcaaaaattgcacaatagttttcatgtagtggtgagatgcacaaaagccaaagctttgcgacatgctctgcgcaagatttggggtctcccagggggaagctcttttttaatttttctgggtcggattggctgcttatgcttctaagctccgtactagctaaatccctttagctggtttggagagcttggtatttacgtaatgatgttgtccattgcaaaggtgaggaggtgttgggtatatctgcaacatttttacaagctaccatggctcatttgtgcaagccatgggacaagaacctgatcagaaaggaaaagtagttttgagtgaagtatagattagttccctaaacctgaagataaatagaactttaggcattggttgcagttcatgggaattgccagaacttggttgggctaatattaatgttgatggtgctttttgtgcaggctcaggcaatgcgggtattggcataatcattcatatagttccggttcagtcttgttatcgtcttgaaagtacattcgccacagggcgtcggcggaagaattagaacggtttgcttgtaaggaaggtttagagctggacgtcgaatgggtgcatatacaccagtagtgctagaaacaaattgcatgtttgtagttaatgcactaaagccgcactaagagaatcaatcctaatggtgttatactatcgccgagatgcaaagtacagaggagttgctagtagaggtgaagattcgtcatgttagaaagatgttgcaataggatagctcatgagttagcacggctggctagtagaagaaaacattgtgcggcatgatgggagtatgtttccacttgcatacaaggccttattctcaaagattgtaatagccatgtttcttgtgagtaaagcacactctttctaaaaaaaatcgccactagttcataggggtgggcgtaaaattaattatggaaaaccgatctatcgacttaaccaaacagttttccgatcttgcatttttttcgtcaattttagttcaatcttgggtgttttcgcatggttctctattttgacaaacgacgaagccaaacaattgaggcccgcttaatttacattattaagtgaattattgctatagattttatgcacgaaacaaataaatcatttcaataactcggtgaataagttaaaaacaaacaggcccgaatcacatatgtgcaccaaaatgaaaaggtacactggaggtccctcatcttgtcaccttacaaaatcgtccttgaaccacaaaaccggatacaacacatccctcaacttacaaaaccagcgtaaacgagatccctcgc

SEQ ID NO: 52004 - DNA, 3661 bp, Oryza sativa
atatcttcatgatatgttgaccgctgacaaacggttctttggctttggcaatgggagcaagagcaggacgtgttagtgacagtgttgaggatggcctctctccatcgaactccctccggcgtcaaatccaagtcagcttcgattccttgcctcctctgctgccatcgtccgaccatgccgctacttggccttgtcgacgccaaaaggtgttaatggccgggaagtccaacctgttcctcttccccttcccctcactttgctctcaccatcaacaccgacacaccaccagctgttgacctcatggtttcacccactgccagtccgccgcctcaccactcgcccttgttctcctccaaccaccgtatcgccgcctcctagaccatccctctaagcctgatcctcacctccccatcccagcatcacccttctcccaaacccacccctgaaccctaacctgagcatttatcataacgttgtcaggacatgttcacgagatgcccatatcgcatacgtccgtagcttaggctttctgagataggtgcaccacatatatgtagagctagtcacttgtgtaggcttgtagttatatactagctcgttgctggtcgttgtctgaatgtgtccctaactcactaataacatatttctttatcaaacgaactgaaagacctagtattatattgtgattccattttacagtgcccttacatcggtaggccttcagcttataacatatagccaaatttgaattttataattaatctagaaacttttcatctatccctttctattttctagccttgatttttgggtgttacgagtaagagtgtaagtgtatggaaatctttgccctcggatgatttttgttgcttcgttaatttttatcaacttataatcaataggagctacgtgaggtaattgtattggttttgttaaaaaaatattagcatcctggtagctacactggaacataattataatgttgcccatatttccaacacgctaacacaaaagtactgagtggtaacaattatacaagatcgtgtgtactaatcgatagattgtggctcatttaacgagccagatgggggataacttcagaactcataagtcatggagaatactcacataaccgggtctatctacaaagcgcggtttctttgatcaatcgacataaactgcataaaaagcttgggcttcgagaaagtgtgaactctttgattgactaatcgtgcaaaacagagtttgggcatatgatatattggcaatccgttgttagccaaatagcacttactaatgttgggatacacataggctacaatagtataaatcaaaatttttttaccatgtaaaccaggaaccaagcaagtataaaatcatgaatcgttaccactcgacacgttgtgcagtggaagtaggtgctaataagccgaaggaacattggcgacgtagcgtgcgtcaatgttgaggaagtagtcgatcgcagcagcccgaccttctgctcctcgtgcgttcgcctcactgtgctaccacgccaattagcaccgcaaaccagcggcgcctctacaggtatccacacgtccatggatggaacgccatgcgcggacgtgctagcgcccgcgtgtggctagggtttggctcgagagaagagtgacggctagggtttctcacagaacaccagtcacatcacctcaagaatatatagaatccataactgggccttcgaggcccataagagtcctactcagattcctatccgaattgagcacatattgaatctttatccaatccccttattccgacccgttaagtgtgcgaccccatagattcatgtacactcggctgcaacccgaaaactccttttcggtccacatgtcaacagcggctactagcagaatatattgacccatcagacatacataaagatcatatcggctgaacctctagtgtacacttgtatgaacccttttgcctcatgatatcgattaggcttaaggctagatatgtgccatcctttaatagctcaatcattcactcgatcttgtgatagattatttaacctgtgattgactcctcaataatttttggcatgatcatatatttccataatctataacatcgagggacccatgatatcttttcatagaagaggcaaatcccatcatgattattcatatcccactacatgtttcatagcataccaaaagattacttttataactactcaatcacagagtagcatttggcagcccctaagtaagctactgcatatgttgggaatcatgataatcttaggactaaaggattctacaccaacactaaatgagatcaccgatggcacgtcatatataacttttacagtgtctcatgttgggtctatccaacaacatgttccctaacatgtgtccacattattaatttggtatctccataccatgattcatgatacatgatcgtcaatcaatacacgtgctgatcattaaaccatatttgttccatatatgatatttgatcaaggatcctttagaaatagcaacatacaacataaagagtcttatgaacaaataacatattcattaaccaataatgagttatatatttcaaggaacaatgtatgataaatatgtaaacatattatgtgatacaatcatctctataattgcctttaggacatatcaccaacaactgcctcctcagccgatacaccccgaagacatcgttccacctgcttgcaaaatgccgatatacgagaagagtgtggtccctcttatttgcatagaccacacatgaatagctacatccggtaacgtggagcgcaaccaacacggtgcacgagtgatggtttcttagtggcatctacataagggttgccaaaaaagagtatgtatgcttatcctgttgactataagaaaattttggaaggagaaaaaactagagagtttttctttttttaagggaaacaagcacgagagtgtgcaattttcattaaatatagcgggagaaaaatacagcccttaagggcaagaaaaggtaaaagctaaaggaagaaaatctatacactatacaaggtgtggtataagcccacgtaggtattttgccaccaccagaaaccaaagagtttttcagcccaaagaaataccggcactgttttcgctcacgaaaatcaaggagataaagacttggactctagcaggggcaaaacgtctgtctaagttcgttccttatgagagctactatacgtacgatattccacgtacgaagctcatacgaagtaatgtttttaacggaaaccagtcatgttgtccagccgtttcctagcgatgcaacgagtaacgttcgccaccgtcagcaatcatacgagagtcgtacataacagtcgtatgcatagtattttcacactactagaaaaagcattttttccaacgtgagggccttattttcacaggcggacatgacccttagagccaaatgactgtctataaaaatataaattcgggtgaaatttgatgcccgcttgattttcgcaggcggaccacttaagcggcgcctgcgaaaatcgcaggcaccatcgcaggcgccacttaagtggtccacctgcgaaaatagacttgaatataaatagacttgcgggccctaatttttttctaagtcctcacactct

SEQ ID NO: 52005 - DNA, 1276 bp, Oryza sativa
acgatactattgtgtgctgatgtgagtcaagttggtgcaaacttatactagaatatggagtttctttgttgctcatgggcaggtgttgcttgaggctatgggaatatagctggtgatggatcaggactaggcttaggagaagttaaggttcagacggtcaaggatatcatgtgggatgctcaggctagagaacaatgcacgtggaggtgaaggttggagtctaagtttggaaagattggcaatgtggagttgtacggggatgttgtttcccaagtcttataggttcctacgtgattagagtcctagttttcgttggattcgtggctaggggaaaccacgtttgtgggtgtaaatatatgatggattaaagctagaagatatcgactttttggaagagaaaaattaagattttctttgaggtttcaatcatagttcatgagttgagagaggagtgctttagatgcactttgtaaacacatatcgatgcaataaagttgatctactttcaagagtttcatcgatacatgtttttctagatcagacggtttgaccggagttcataggacggtctaaccggaggcatggcgatggtctaaccggtggcgaggaaccggtcagaccggtggcgaggaaccggtcagaccggtggcggcgagaaggtagcagagggaggctgcggtccgattggccggataacatcggtcagactgacggcttaggggaggtcagacctgtgtgcacatggaggtcagatcgcctacgcctacgacttcgtcaagtttgaaggtaacttttatttccatagaaagtttttggtattcctaccattcaccctcttatggtaggtttgttcggtcttgttcgatctttgaagtacatgatacaatatgatatgtaagttgatatgcatgcatgatatctaactttgtcaaatttttcaatcaatcttctatatataagaaacaagggcacattacaaaatgaaaaacaatgtgtcaaatatcactgttggagaaagggtttttaacccggtttgtaaccccctttagtcccgattatacaaccgggactacgaatccaggactaaagatagctatctttaatcccgggtgaaataaccgggactaaagatccatatttagtccctgttggtgttactaggactgaagatggaagaggccaggtcccgattggcagttttttcattgtttttaactccttgcatattgatttcactccattcccaaaacatccccaaattgtgaaacccccaaat

SEQ ID NO: 52006 - DNA, 589 bp, Oryza sativa
cgaggatgcatagttatttttcatattttgtactacatccgcccaaaatataatttttttaagtatgaatttaaacgaacagttatctaaatttataattagaaatacttatattatattatattttaggatattggaatattctgaatactataataagacaagcgtcactcaacaccaaatatacaatgtgaaaggcagtggtaattaagtggagtcggcactcaacaacagtacgcatgtcaatgttcaacttcggcataggtacacgtcatctcgccgacagatcatcatcagaattcagatagatccgaatcatacccagctggtgcaagaacgcatcacaacgggcccctgaaccctaacgcgtatatggtccatgatggattgatggatatgcatggctctcgatatctctccaaaaacgtgtgattttcactgatgaaaaaacgtgtgatttatgctatcctaatgccagcatttcccacgtgcacgattggaaacattcctggatattgcagagatcatatgtatccatttcttgcttaggataatttgttttgtcagattattttcttaaaggaaaatt

SEQ ID NO: 52007 - DNA, 783 bp, Oryza sativa
agtcttcatcctaaaataatataggtcgtcaatctcacttattagtaatatgacaaaaaacacatcaccctcaaaatcctagatgtttttcgtttcgggagggtcaataactggctatggttccacaatattcacaaagggtaaatatctggtgatagttcaacaagattcggacatatgtttgtctcattgtccattttccatggatgtttggacggattatggcaaacacttatagcatgaataaaatattaaattacctctatttttaatatatgataccattgactttttaataattttttgactatttgttttattaaaaattttctgcaaacataaaagacctttaatataaattaagtcacaacaaaattaatggcaatcacatatctttttttcacataccttttttaaataaaataatttgtcagacatattttaaaagttaatgacgttatatattaaaaaacggaggtagtatattataaactaaaaatagcttagaacaagttatttaagcaatgctagcattttttttgcggaaattgtacttagtatggcaaaaataatttaacataatccgtcaaacatattctaaagaccgtaccttcgtggtccccaaagaaacataaatcttttacttttctgcgatacaagtaaagcatgttttatatttgagtaaaatatatggccggtccttaaacttgttgtgtggtgtcacttaggtctgtaaacttaaaaatttcacgtttaggttcgtgaacttggtttaatgtaccc

SEQ ID NO: 52008 - DNA, 2276 bp, Oryza sativa
tagtgcacagatttagagcttgtttgctaaaatttggcagttaaaattgccgaaacagcagaaggtctccaatttcttttaattataaaccgagggaaagtagtttgaaccaagttgtgttttcattggaaggaatataagagttttttatacagtagtatatttcgggccatgcatgttgttcgtttttgttcttatgcacttttctgttatcttaaatttgtttgaatgctgaaatgcctcgttgacatgcagggctgaatggcaaaccagcgccatcggagtttgttttcactggaagccatattaccacaccagcaatcaatagaactgtctatcagccttcagctgttcctagtacttccttaagaaatgtggggcttccaagtggatatagccatctatggactgcttgtaattctctggatactgaccaacaccaagaggtccagcaagagcagactaaagttaatgaggagtttgtcaacactagagctgaagccaacatgttttcaaggattcaacgttccaggtcaaggcaaaggaatatcgaagaccgcttacgtgaaagggatgaagctgcaaatggtggaagtagtgatggtttgcaagacaggatggagaggtctaagattgctggcgtgcggctaaacaggaccaccacatcatcatcctctgaaccatgtggtggtgatgcaaacaattctggagcaacacacccttttcgaggtcaggagaatgatatttataccaacaagaggaactcagttgaattcttaaagtgcagtaaagagggtggtcttggaagtggagttcacttagattgttccccatctctggttctagaaaacaagattgttagttctgacagtctcttcaaggttcctaatgactgctccgctagagattcatcaagaacacaagttgcagatagcgtgtgccatcccctccctgaaactcatctatttgttgagcccaaaattcttcaatttgaaggtgttgaatcagtatgcatgaatttttcaagtgaaaaaatggggcagccactggaaagtgcccatcttgatcttgctgaggcacatcctttaaatgaagacccatcttctactggctgttatcatgtaccttgttccgtgggaagctcattggttgatggtgttgaattgggacttttaagcactgacagtgcaacattgaagcagcaccttcaatgtggcagtcctgatcttagtcccacacattctcgaaacaaggacccgtgtccaaccatttcctctgaagtacctaattacacgagtgaaccattagttgagcaggatacatattgtaatcctgaaatcaattctctggaaggaccatgttctaaggtcagccaactgcttgaaaaggaagaaacgaaggcatgccccgatgccaatccactgcttaaaacagatgcattgcataccataggaagcaccgaaagaataagaaatcttgcctctcggaactccactcctcttgaacaacggagctctgatcctcatgtcttgccttgtcaacgcagtagatctgtgcaaccagctgacagtagttctcggcctcctctatcaacaggaatattgccggacagtttgttggaagcggttggtttagaccaccttccgcattcaaatgatacaaatagccaatgctccccatctaggtctgctgcaagcccagatctgcttccacttcgactcgttaattctggtgatgtttatcaaccgagcttctcttgttgtaaatcacaaaataacaaagattccaatggttgtgctgttgagggcaccactgtatccatagagaaaccgccgtcccaggagcaatatttattggatagaccacctatggaactcaatggttttgcagatgaggatactcccttgggccacactctgggtacacataatgagatgctgaaaggaaagaaggcagacgacttggtgaactgccattctggaaagctcaacagttctcagaaaaaacccaagggtttgactgaagcatctggtttttcttccggaaagaatgagtctgcagggcaaaaggttgaaagcaatatttcaactggtgtgatgcacacaacagaaaggagcagggggttttgtgccatgaactgcacggaagatctccaacaagatggtactgcgcttattacttgtaggaattatcttaatttgtcttttgtagcaactgccactctggcacgtgcttacatagtttctaatcttgcaggaacagaacaagaaacctct

SEQ ID NO: 52009 - DNA, 2736 bp, Oryza sativa
aattttttgaataagacgaatggtcaaacatgtgataaaaagtcaatggcgtcatctattaaaaaacggaggtagtataaaactttatagcattgctcatattttaatgaatctagacacaccacacgataatattgtatatcgtcaagtgtggccttcgttcttccacgtcgcgtgatcatttcatctggtgcctccatcctatttccatggagcgaataaaatcataaatgacagttctcatatgatgtacattgtacagtatgtgatgctgcctttgtcctttggctgaacgcgtgcagccgcatgtgcacgtgtagcaaagctatttttactttcttatttttgaaaactagatgaagatatgtgcctagatctgcatggaaaatgatgaattatggtactagaagaatattatgtcctcatcgtcacagaaacaaccggaggtgtgctgataccggtgggtacataaatccatcccgagtttaaatcctagctcctagaaacatgcttcaatagaaatttagtactaactccgtcccataaaaattaaatatgtactccctccgtttcacaatgtaagttattctagtatttctcatattcatattgatgtcaatgaatctagacatatatatctatctaaattcattaacatcaatatgaatatgggaaatgctagaatgacttacattgtgaaacggagaaagcaggaaattaaagataaattaggaggatagactataataaccttatttaataaacatagtgcatgcacgcatttcatatataagattgattaaaaagaaggttgagacaacggattagagatgagatggaagaaaggaagatttcaagaaaatgtaatcaatttgatgggtcctatattagtagaaataagatttttatgcgacaaatgtttaaaggcagaaatttaatttttacgggactgaggtagtaggattagagtatgtattgacagagtatgcttagccacttaatccctccgtcccaaaaaaagacaaaccctgggtttccgtatccaactttgactgttcgtcttatataaaatttttttataattcatattttcattgttgttagatgataaaacatgattaatattttatgcgtgacttgtctttttaattttttttcatattttttttaaataaaacgaacggtcaaacgttggacacggaaaccagggtttgtctttcttcggacggagggagtaggtactagctccattctaaaatattaaaatataagatatattgtcttacatagttatatggataaaatctcctatattttagaacgaaggtagtatgtgcacatgacttacatgtatatggtaaattggtaatgactaaaaagagaaaagaatattagtcatcagaactcaagtcacggatggaccatatagctagctagtgattggcgagtcaatccaatcctctatggattatatatataaagtgcacgtaaagttaattcaccatggcatttgattatagtgctatttgacactcgagttagcagccggccggggccgggcgatcacctttgtttgacgaataaatttttttaaaaaaaactaatgtgcacttttagtttgatatagattccactttttgtacattaattacttgctgttggtacaacgttgacagcgtcgtccaagaggaagaggaaattgtggaaccttttcttgtcgtctttcaattaattagtgcgtgtatgattcatgaaagttaacgtcattacatgtccttccaattaatctgtgaatgtgcaatattatattgatggtgctattatttttgaagcacatgggctggtgggaatatttctcagaggttaagtttttatcttttcttagaggagttttaaccatatcggtaggggttttgggtagattgtatatatggtatggagatctcaaacatatatattcaactcaagtttggattatgacaaatatacttgacacatgtgctcgtatttacgacgaagtgagtgtacctcaactggttagatgcttgtggtggaaccaacccacctagatttaaatcgtagatttaacatagtgcccgcatttatggctagttttttctcagaggtagcagacgtagaaaggcagggtgagtgtgcgcgcgttgtgagcttctgtgtttgtactatgtttctagaaagcaaacatacttaaaatataaagagtaaaatacatggccgctaaacttgtgttgcggtgtcacttagatccgtgaacttgaaaattgcacgctcagtgaacttggtttaatgtaccaccctggtccaaacgtcctttgactgcgtttgaccgccaacgtgacatcccacataggcaacacttttactctcagccccctccacattacaacacgtcgcatatatctccttatagctatatagtgacaccagaatcaaaaaaaaatcctcaaatagttcttcctcctcatttttctccttgcatatataaaaaatgtggtcttgattagcaattgccatttgctctgcgctccaaaataaccttatccttgcgcaacgggcacttcatcaacaacaccttcttccggcgacttcaagacggggacgagcttggagaatcaatggggatgcctagcgtgcaagacgcattgcgctgcctcccgccgctaatccggccgcactgtgcactgcgctgcctcctaccgctattctcaccgccga

SEQ ID NO: 52010 - DNA, 1123 bp, Oryza sativa
aaattggtttacactgtatagataatttaatctcacacaagttccttacatgtaatcttattcatggaactacagctaaatcatttcactactacacctatcaaagcaagttccttacatgtaatctgatgccaaaacaattagaatagttcagctagagggccaggaatttatctcgctgacgaaaatgcaagcgtgcgttaatatttttacagaattgcttcagcaatacttgttcctgaaatacaaaggaaatagttggtaatcatataccttcattcttctatgcaaaagtggtatccctgtgtggaactgaaattgaaataagatgtataattatatgaatcccattaatggtagattacatgcttagcacttaaaagaatgcagtaagccaatgcaaagaatctgccaagtacaaaccaattaataacataaagttgaccccaaaaccagtttagattatatgttacacccagaataaagtattgctacaaacagagcacaattgttcagcggtagctttgagtttctcaataattcaaggttggaaaacttttagtaaagaaacatacatggattttctgtcttctatgatgccagagaatatatggtgtaggcaaagtacatagcggaatttgaccaatatcatgctatgatcaccacctgtgaaaaaaaaaatgtagcgtaaaccacttagcgaaacagttcataggcgaaccaacaatttcaatagaatcttacatgtgaaagtgaaacatgtaacacattaatagaaaatttggacattataaaatataatattttaagcacgataaatatttttaaacggtatatgactttccctattgtatcaatagtagaagcatcagaaccataacacataagagcataataagcaggagaaacaatattcaaactaatgcatgtgcttaaaggttcaagcactcccttcctttacatgatggtcgtgtaagccggtcgttacatggtcgttgctcttacatgaccagatcttacatgaccatattcaggtgtagccttaactcgaccactataaataaaggtagtgggagtatcgctacacctctggtcgagaaccaggtgtagccttaattaactc

SEQ ID NO: 52011 - DNA, 1653 bp, Oryza sativa
ctcctatatccgaaggttgtttccgtataagacatggatgtggtgggtcctgccgagatttagtcaactactattaggtatgtgttatccataaccctgacaaattccccctttatttacattgacaattcaccataagtcacttataagatattttcacaaatacctatactccattataaagcaccattacaaagctatttaaagtgtctttatctctactataataaaaagaagatatttttccggtattttggtacgtcatccgtgtatgagtcggtttttaagtttgtttgcttttgggaataaatatccgtatttgagtctgttttttaagaccattcacttttggtaatacaaaaggaatcatataagaaatttgtttaaaaaaactcgtatgctaacttgagacgatcggactcctaactgcagctcatgattttctaaaaatatatatatatacatacgatctcccacggtgaatttcatcttaactaaaccatataacaataataagattaaaataaacttcacccgttgcaacgcacaagcgttttttctatagaaataaaaaaaaggccttacaaagacattttgttcatttgttgtactgtggtccttgctgtccctgcggcagatgcacatcctctgcaatactgctgatgcagtagcagacactgatgtgtgggctccgctactgcatcagcagtcctgcaaacaatccctactgccctgcggcaccccttggactttgccgtgagtacgtacgtattcacttgatctagtaggttttgaagttcctacgttgcctaaatttacagatagggttgatcaatcgtgctgtatggtccaaaggctctcatctagtttacttgtcataaatatctattaaagtttatcctaataattgtagttaatgatatttatctcttctctcaataaaccgtatcatatcattttttctaacccttagatgattaatctatactccaaaatatcttcctccttttttcccaataaaattatcttacattagattagagttatctttagatgattaacctattttatcttcaatcttttccttctgtcattaagatacattaccttagttttacttttgaataatcaaactacatataatttaaattgttataaaccttgtcatcttaattgtttataacttttttcatggtcgattaaatatgaaaattatataaagtatataaagttatgtcatctagctatttttcatgttattttatagggttaattggatacatgccattagaaatttaccggtttttaaatataccactagtatttatgtatttggaaatatgccattataatttcacacatattcaaaaatatcactacttacctcttatatgcatttccatagaaaattggaccaaactgccatttttccccgcttcttccttcttcccctttctccttcctcctcttttcgttctcagcggcggcgagtggtggcaacagcagcagcagcaacgcggttgcgagcggcagcgcggcggcggcagcagcagccgcagcgacgcggctgcgagcgggggcggcagcagtaaggttgtaggcaaagcaacacgagattttacctcctgctgttcaaaaccatgtataactcga

SEQ ID NO: 52012 - DNA, 1916 bp, Oryza sativa
ttcgcaggtgcataataagattggtaggtgtaaattaaagatgagaggatcaatctgacaagcattggaacacatacatcaaatacatttttttacttatagtgtcatataactgattctcaagcctcaatgtacagtgctatatgtgagatgatcgaagatgtcagagtgttcactagtacaaaactacatatctgtgacagcctatcccgtgtttggtctttcgcactgtcacaacgtcgtcatctttaataggctgaaataaataccgacacagatatacccgtacagacatattccatgagcatctattgcgagcccgtcaccgatgagacctattgatgacgggcttatgtttcggctcatggaataggtccgtcactgataggtctcatctgtgatgggccctaacttaggcccgatgaagatggttgtttagccccgtcaccaatgtgtgtcattggtgacaggctcagttttaggtccgatagagatcactataaaactcgtcacaaatgttcattgtcattgtcatgtttacgatagcagagatatgcgcattgtcattttttcaaacatagttatatgcatgctaatgtacttatgaatacatggaaaatccaaacaagccaaataaattccattgcagatgagtaccggagcactgtccattaaatttattctaagtttacaaatttgggtctgttagatgtaatcagcttatatagttaattgaaccattttatttaatttgttataaattctaatagatttataggtgggctgcttcaagcaaaagcttaaagttgataaggaaacacagctaatacaactaattcaattaattataacttaacaatcccctcatatacatgtttgaggtttcccttaggccttgtttggttgggccattcccggccgggatcggggcccaatccccgtggatcaccctggcgaggaaacaatctcggcccatccgaaattgtgtgttcggttaagcccagtatgggttttaccctggcctatcccggcctttccccctcacctaggcccgggaaaaaatcagcttctcgtgtggcgtggaaaaattcctcacgacgggagccgggaggcgacgtgcaacacgcgcagtggcagcacgacgcggaggcaattcgaggtggcacaacggcgggagcggcgcgacgcgaggcgacggtgacggcacggcgctctcctccggccaccattttctttctagtgagcacgcagccttttcccttctctcctcctcttccaaagctagggttagggttttcttcttttctccctttcccttcgtcgccgcaattggtcatcgtcctcctcatatcctgctcgatctggtgagtgcttgatttgggtgaggattagtgagttcttgatcagatggggaatgagctttttttcttggttgggtggggatgagttattgattcgccgctgccgtcacacgtcctaaaccatctcattagttcttgatttgggtgtggtgtgttcttgattgctgcatttcccgctctactagaaaaatgatttttagcgatgttagccttttatttttccaggcgggtatgactctcgaagccaaatatctgcctataaaaatataaaccagggtgggttttcatcatccacctacgaaaatcaatttttgcaggtggaccacttaagtcgtcattcgtcggcgctcgaaaaacaatttttacaagtggtccgcctacaaaaattatatttttacaggcgaaaaaatacgtggtccgcctagaaaaatcgttctataaaatcttcttccttatctactcttacagcccccatccttatcttctcatccaccctccccccaccactcatttccccctctcctctctccctatcctctatctccctcgcgcgca

SEQ ID NO: 52013 - DNA, 1637 bp, Oryza sativa
atcataacgttattatgaaagtgtggtaaatattataagttttgtagtaaaaaatcgtcttactgcaattcttgaatagtgctactgcataaacttgtggtaacgtgtatctaccatgcagtaacacttacacttttgtgcagtaacaaaaatatggttagcatgtagacttttaactcatatatttttgtttcaattcctagtttactataatttcaccacgatgttactatcaaaagtgcagtaacatcctatatgttttgtagtaatgtgatgtgttactatacttatacgataatgttactactaaaacatagtaacttgttatgagttttgtaataacatatatatttctcttctacttagcttcctacaactatggaactttgtgtgtcctgtagagttgtaatagtttatgtgcttttacagtaatcgagtgtgttactactatttcttctcgaagattggtcttttgaaatttatctctccataagtagtaatactaaatcattattgttactactttttatggtgtgttactactattccatcatgacgttactatatgtgtgcagtaacaactataatttttacagtaacatgtgttactgcaatttcttaatagcgttactgcaataacaggtggtaacaaccaaacacaggtacaagacctaccacccactttgaactagtaaaatgtaagtgaaagtgatatcttttgaattcacatctttaaacaataatatctctcacaccacatattatatttttgaaccttttgcaccataatgctttaaaaaaagagctctacaaaactagatccgtcaagactatattttaactatattttattagtgttactgcaagtaagctacagcgttactgcatggtggtcgtcatgttactgcacagttcgcacgagacgaggacaacaaataggtagacgtgggaggaagttagcacactggtttgaccgacatggcagcgatttgaccgtcctttgaccatgctttgactgggatgggaggtgggttatgagcccaataaaaggatgcggaggtgggttgggctcttgagggggagggcggtattattctataccccgggtgtagaatatatatatatatgtatatatatatatatgtatgtatgtatgtatgtatgtatgtgtatatatatatatatatatatatatatatatatatatatatatatatatatatatatatatatatatatatatatatatatgctaagtctaacaatcttatattaaatctctaataatataataatcttatattaaaactctaataatctaataatcttatattaaaactctaataatcttatattaaatctctaacaatcacttctttacatcacttgcctgcgcgaattcctttgatggctagctaccactcggcttgagggacgacgacgacatcttctctgcaacattactaggaaaatgtattagtctaaacgggccaagttacatatgttgtatttcacgttttaacctatatatataatcatatatgtatgctaagtttaataatcgtttaattatctcgttcgtacacgtttcgctcgcgttcgttcacatacttttagtacaagtgcattcacgttcg

SEQ ID NO: 52014 - DNA, 757 bp, Oryza sativa
cattcccctccgtccgatccgatgggaggggaggcgacgggcggcggtggcaggcggcggagcccgatggattgttttttttatgtttttgtagattcttttagatgtttttgtgatttgtggatgattttgttattgaatatgtttcaatctgtgatatgtggggatttggggatttcaaacaacgatgattgtaaaccggggatttggagatgtggggaactggggcatgacgcagtgacggtgattgtgagttccggctcgatttgagccggctcttttttttggctcgtgcaaacctctaggtgccggttctatttttggtagggaccacctatacatttgtcaataaattttcttctaaaaatttgacagttataattttagtacaatcttagtgtaattactgtgtaacttgtatgtaattacgctgtaacttacatgtaactatattgtaacttgtatataagtttcacgcaattttgaatcgttagatctattataagatttgttctggtgaggaagaagaaaaatcacagcacacgcatatgtgaaaggacttgttcccacgacttccattttaccgaaataacatattacggagagatttttaaaagttacatatatgttacattatagttatagtgtaattacatgcaagttatagtgtaattacactacgattgtactataattacatctgtcaaatttttgggagaaaatttgtcgataaatatatagcaaaaggaaaaagtac

SEQ ID NO: 52015 - DNA, 2173 bp, Oryza sativa
aataaatcatccgaagaaatgatttaatttaacctacgaggtgaatccttaattaaataaatgcatttaataatcagaatcggcatgggaaatttctcttggattctacatgtcaaaatatgctaataggattttcagtggaattttcagagccttggaaataattttaaccaattaaaataagcaaagtgcaatatttaatccttgggaaattccttttctttttctctttttcttttcctcatttttctatcttgttgggccgtcggcccctcacctcccgcgtccaccccttccttaccgggtcggcccgttttccctcctcctcccgaagtccaggctacctccccctcactccctcgggcactgataggtggggcccacctgtcagccctttccccaacctccagccgctcccccgagccggcaaccgccgccgcgcgcacgccgcccaccttccccgccttccccgcgtcccgctccagcacgccccgccttccccgcacccatgcccccacttccgctcgcgcccacggcacgagatggccgggattcaaatttgaatcccgcctctctctctctcctcctccaacttccccactaactccgacgaaatcgaaccactcccggccgttcccgacctctccgcccctatataatccatccccacatcctcctcctcatttttccttgttccgccgacctctcccgagctctccaccgctcccgcaccgtgcacccatccgctgcggtctcttccactactccggtcgcctctagccgccgctagggccaccgccgcaccacaccgtcgccgccgtcaggtttgcgcggccaaggtccacctcgtccacccctcctccgtcgaattccgccatcgaaggccgccatccgccgcgcgccggtgagcctttccataggtcaccctagtctagtctaatgaaattaattagtccaggtgggtggttgggcctgttgcaacgtggtgtagcgttggacagtggatggttaatattgattaattattacaactgtttactgctttcaactactgtttataaatgctcaatttatgcaaatgaaccgctttagctatcctttggttatatcctgcatcataccccctgttccggtatgacttgctgagtacggtggttgtactcagtcttgctctattttccccaaaaccccagagtttgagtatgcgtcggatggtgacttttccgaggagtaggcttcgtccgtgccgtcgaggatgcctgtggagtggtgttcccactgcaatccaagtcaaggcttagctccatttatcttttaattttccgctgcatttatgtaagacttttataatgtttttaagacgtggatctgtatgtcaactttgtcgtttgtgtaccccgggcggtcctggacgagggttttaatgcacattctgcatggaattctattcgggaatttctgggcgtgacacttccccaccgcgccattgttggcgactgttaaagcccattgtataccgctaacatctgcataaagttcacataataaaacatccaacatactgataggtgcttaatctcacatattccagaagtgttggtgtatatttgtatgcaggtgataaaccctgaatttggtttctcattcagggagtgcgaactcccagcggtgggtatggtaagggcttgctccggcctttgacggcgttggagaaggaggggacagcggaatcccatagccctccacctatgaaggtgaagcgtcacttgacgcaccctccaattgtaagggcggccggccaatttcaaggagatgaagtaaagtcgccggagccctcggttcataagctagcatcgcaagtaaagaagctccgcaaggagaacattgagcttagggaccgaaatgcggagctaggggtagaactttttgaacttaggaataatgttgatacccttagtcacggtttttgcgctaaaatcaagcgtgcatttgtagaaatggggaaggagaataagtattatgctaattagatgtctcctctcccatgaataaagtagtagtaggtgcttggtttttatcttttccaattatgtaagaacttgctataaataatttggctcattggtgttaaccccaatgcatgctaagtttgtttttgtttttttctaataaa

SEQ ID NO: 52016 - DNA, 799 bp, Oryza sativa
gggcaaacgaaagaggaggagtagggggtcctatttatagccatgggaggccgggatagagcccacaaagacgggaaaatctcaggaaagtttagatattcgcgggaaaaaggaaaggttgaaccgcgaaattggaaaggatttccatataaacttttggggatttcttggggacaaggaagaggagattgagaggattccattcccgcaaccaattcggaaaaaggagcaacgatgaggttggattttggaaggggatcggcggcaacaggcacggcacggctcggctatggctctggctctgtccagagctggaagatgaacagtagcgcagggagagaaagtagacttctttccgggcttttcttttctcagcctgattagaagagggagcaaaacaggactttggctgagagaagaagagaggatgcaggctcgggttgggccggcggaagagagaggaaggaaaggaatgggccgattcagcctaagacaagggaggagaattttattactttcccaattaaaataatcacttaaatgatctttgaattgttaaaaatacttccaatgctcaaataatttcaagaaaaatcctgaaaatacttggacactcaaagtacttaacaaaattacaattagaccatttaatgattagtttaatatgtgggtaattactgaaatgctctttgtatgattaaaaattacgaattgagctccgaaaaatcccagaatattccagagagtataattaaccatggagaatttaataaaaattaaatccatccatgctttatat

SEQ ID NO: 52017 - DNA, 686 bp, Oryza sativa
ctctaagaggttttcatcatcttgtttagatcttacagttatctttatgcttaatgctacatcggttgagttcgatctattaagttctatctataattgtgatatctagcctggtttatgatcatcaatagagatgtatcggagttccagccgatcttacctgatttagctattttatcctcatgcacttgactgatatgttaaatatgccctttatattaagatctcgttgcgttaaagttatattaggtttattatttgatatatcttgcttgtctcgatatcttgatatagagtggtatcggagtattagccgatacatgctaggtctatttgatcggctatgctataaacttctatataattcatgttttaatatatatttcgatttaagtgatttatattgtctcggcatggcgaccgatctatcccaattacttagtttaagtatatatcgaagtaaagattatatgttgttaatatctacagctgatcgagtagatttagttttattttatttactcattactgccgaccgatttaaatttgacatcggcttgaagataaatgatatgtcatcgataactagcctctcggctattatttatagatttaaccgcggtttttcttctctttattcttgttgattgcagcatcaaatcaactggcatgctcacgaacctaaa

SEQ ID NO: 52018 - DNA, 1470 bp, Oryza sativa
gtgtagggcccaccgtcggacatgaaaaacactaatgaaacaaaggtgccggttttgggttgagaaccgacacctttgtctcaaaacaggcacctatgtgtggggcctgccaacggctagtgtcacgcccggaatttctatccaaaattccaaacgcttacatgtgtgtgaaccctcgtccaggaatcagccgaggcacacaataacaaattgataatagagtacaaatattactctaattaataagcgaataaaatgtcattacagaggtagatagttcctctcaatcaataaagatctaagcagcggaaaataagataaacggcgcagacggctccactccacaggcagcttgaccaaggctacacctaatcctccacaccattagcctcattgtagatctcttcctctgatgaatgattgcaaggtgagtatatgacatactcagcaagccacgcagcaaatatgcaagtgcacaggataacaaaggatggcatagtagggtttcatttgcaaaagcagcatttagcaaacatttcagaatttaataaaacagttaagtaataattaaacaatattaatccaacgctatacaacataccctgttgtataggcccaaccattctgaacaaccatcccggctgcacagttctatctccaaaccaggaatataccattccaaaccaggagctaatcaaattattaccagttatagcatcatctactatggtgagaagggtgagactaatcacgaaagacattgttagacccgcccataaccgcgggcacggctattcgaatagttttactctgatcagaggtgtaccactgtacccacaagacacaaccccacatcatgtcaccatgtgcctcaataccaccacggtacctcggaaaggagttgtgacaataccccttgcataacacaatccaccgcagcgcaccttcctggatcataatcacccccttataaacaaggcatggactccccagtgacccccgtgggcttatctccgccacttcttagtctggtgccccgcaatgaaccatgctatacaaaagataaagccgttgcccacgctggcttgtggttggcacggttaatgtttcacaaccgaaactcgtgaaccggtccttaattgtcatgagcacgaccatcaaaaccatgtgctcacaacccaccattaccaggttttagttggcacattaattaattaaccaatcacgattgaccatcgtgaactatcattaagccatcattaagtaatagtgagtcataagttatcccaatagtgagctaatgtttctaagcagggctaagctattatacctaatatctagttgaaccaatataaataaagctcacctagtcaaattataataacccaaggtatcaaggaataaagtaatcaagaacaaaagggctataacaaacaataggttaattccacccaatgacattcgaaaata

SEQ ID NO: 52019 - DNA, 627 bp, Oryza sativa
ccttggtctcaaaatatatgagatcatacttgtcccaagtcaaaaataaatttcaccaaatttatagaaaataataacatacttacaatatcaaataagcataattagatccattattaaaaaatcataggttacttatttgatgtagtaaatgttaatactcttgttaaaaaactttatcaaactttgataagttaaatttagaacaatcctatgatccttatattttaggatcaggggagattatgcaaaggatcttattggtcaaagcaagacaattaaagtcaaaactacagtaacaattatctttggtgcctggtataccacgggatcctgttcgtacaagacgatgcaaatttggtatcagattatctgcacaatatctggtaccccataggtaccgggcattaatacatgtcaagtacaaaactgatacctcgttggtctcggtcattacctaacaatatcgcgccagtacacatcaatatcagtcgaaacttattggatatcagatctgagctaagaggagtgagagaagaattaagggatagagatggttacctgtgcaacggcacaccccatcctccatcagcatggcggcgcttcccggcggcggttcgagggggt

SEQ ID NO: 52020 - DNA, 912 bp, Oryza sativa
caaaggtgccggttctcgatccaaaaccggcacctttaatattctccctcctgcactagccgttggtgggccccacacataggtgtcggttttttgtatgacaagacaaaggtgccggtttttggtctagaaccggcacctttcttctaatagcacttttcatgccctacacaaaggtgccggttgggaatagaaaggtgccggttttaggtctagaaccggcacctttgttccaatagtgcttttcataccccacacaaaggtgccggttttttgtctataatcggcacctttcttccaatagggcttttcatgccctacataaaggtgccggtttgggaagacaaagatgccggttttgggtctagaaccggcacctttgttccgacagcagtacttatactccatcccttgctactcgagctgattgagcaagaagagagtggcgcctctccttcttgcccaatcagctcgaggaggggaggaggttttgctctattttttttggtatttggttaaagattgaagcctaaaggtaaatattcattatttctccctccgtttaactcttcgttgttgatttgaattgtcgtgtgcgtatgcatgtaaaatacgatatgggtgttatttttagggataattctttttatcttttttgtgtctattgttggatgaaatgctaaatttgtgttaatgttttcttccacctacgtcatggccgttactcaaattaatggttgtcaaactatgttaaggccacgaaaatatccattgatagcttgatttatctcaaatttatgttaggggtgcccatcgattcacacccgctcattgaattgaattgccatgtggtaataccatgtaaaatgcactagtcattaatttgtatggatccataagtcattcgtagat

SEQ ID NO: 52021 - DNA, 699 bp, Oryza sativa
ttgactttatccatcgaaaacgtcactactgaaagaaaccatttttggttgattgccaaaaacaacaatagtcccggttgcttaaaaaatcgggactaaaaagcatttttagtcccggtttaaaagtgcaatgatctttagtcccgattagtgttaccaaccaggactaaagattatcttttgttccggtttattcattggcacgacatggcaggtctcctaatatttttaatcccggttggtataaacaacctggacttaaaaatcagattttcagtcccggttgtttataccaaccgggactacaaatcagtttcccatgtctctcttccatcattctctctgcgcgcatctgagtcctcacccttatctcttcctcccctccactctttatctctcccttatctcttcctcaccttcctctttcactctcatctctccctctccccttcctcttccacatctgagttttcctctcttccgttcctcagatatgcgggagaagcagccggcggcagctgggcccgtgcaggggaggggcggcggcggccaggcctgtgctgggcaggggcggcagctgccgtatctaggcgcctgccgggtggggcggcggcggccaggcccatgccggaacgatggcgactaggtggtggcggagcgacggcggcccggcgccgaaggccgcgcggcggccggctc

SEQ ID NO: 52022 - DNA, 1817 bp, Oryza sativa
accgggtaaaggcagacggtgagccgtggtgagtattagaatttgatgggataggcccaatttaattgtagtatttttaatgaaaccaaaattaatgttaagggattaatatcatcttaaaaccaatgagaagggacctagacttaaataagctacaaatggatagcacctattgatagggtggtggtaggactgccacacacgcgtgcgcgctgagctaagctggggacggggacgggacgggagggctttcttgccttcccctgtttcctctgctggcaatgtcaaccagtaccaggaatggcggcaatgaatgagaaaacggtggcaaaggaggagagaacggccacaacaacggaggcaacaacaacaatgccttatctggatccaaagcgttctccgagcatgttgttctattcactttagtattgaatatgttagtagatgatgctattcctgttattaatatgttcatatttagaactatcactagatcatccttttattcacatgtcatatttattatcttatttttctgtattaaaatttacaagactacatttccaatagtgaggtaggcgatggcgggcgaaagggcggtggactcgcgcgaagggcagatggcgagcttgcgacgagacacgcacgcaaggtgcttgaccgcaggagtgggtggagcgagaggcgaaggttagggcagtatgtttgtggtccgctgaaggctgagttctttcactaagatccctaacttccatatctcgtttttctcattcacgctttttaaactactaaatcgtataaaatttgtgctttaaattttttcaaaaaaattgtattaatttattttcttaaaaatatttaatactacacttattaattaatcataccctaattattcaccccgttcccagccctaccaacggaacacagcccccagtcgcgcgccgcccattattggagcacgccggattcgtggcaatagggtgcgggtgacgtgagccacagtggcaacttggtgtggtcggcgcggcgattggttcgatctggttcgcggcggtcgagtgtggtgcgggagcgggagcgggagccggagcggcaagacggtttcgatcgggcgcacgggagacggcctccacgattcggtcagggcggcaaatgcggcgcaccagcgctatcgcgtgggccggtttcgcccggtgcgctgcggcgaagtcagcgtgcgcgtgactggtggctgggccacttcggccttgctgccggtctggaccagttaggttaggtcagctagcctgttgctgggccgctacgaatctgggcaagatatgggctgcagcatattgaaaggggagttttttgttttcaattttattttattaaaaaatttaaaaaatatttttttcaaagttttacagatctacacccctaatatccttccaaatgattttttatgacatggtacatattcattggtgtattctaacggccatatggaaatggtcggtcattttgcaaggggccacctacaaagtatcataggctagccatttacaggaaggctctagagaacggcaagtggcccgcttataaaatgttgtatgtcactattttatatagatagtctgcaaggggaccgccattaaaatgttcgcgtgactgtaacaacacaccaacgggtgtgtatcatgacaacataaagtgtttttaaaaaactttgaaaccaaaagttattttacgagagagcgttagggagtaaatttgtaaaactttaaaaaattgtaaaaaatatttaaataaataaaattagatattaaaaaaat

SEQ ID NO: 52023 - DNA, 1883 bp, Oryza sativa
ttatagtataatatagagtaaatttcacaaagctacaggtattttgcataatttatcacagaactacagatttaagagcttgtttcacaaaactatatatttagtgtctccgtttatcacaaaactacagatttaataacttgtttcacaaaattatagatttagtgtattcgtttatcacataactacatatttagtgtcttcatttataaccaaactacaggtgtagtgtcctcattattacaaaactattggtttaacaatgctaaaacctatagttctgtgagaaatgaagatattaaatctgtagttttgttaaacaattttttaaatatatagttttgtgatatattctgcaaagtacatgtagttttgtgacaacgaagatattgaatctatagttttataaaataagttcttaaatctatagttttgtgatagatcgtgcaaagtatatgtagttttgtgaaatttactcaatagtataaaatttgcagttttttttactgtaaaaacacagctcggtacagtggtggatctattgttggggcttgttggtgcgcaagccccatctgcatgattcccttcctctaattagcgactaatgactctaattaattagcatttagcgtaaatatgtactggcaaggaaagctagctcaagcactgaatgccaaaattaagttgccaatgtcaaatatgatgtaagtataccatactaatttctcgatagatttgtgtagatatatttgtatagctgcgaattaaaatggagaaagcaatgggatgttaattgatcatatgcatttggggtttcatccgaaaatacttagttgagcacgattgactaatacagtgacatcttctgtgccacaaatagtaccatgcgccgtcctcctccttgctaaaaatagtacggcgtgccgtctgccgcttatcgtttcttttgctaaaacaacaccgttctaccaagcttgttggctcgagattacacattcatcctagcaggcatgtatgcatcagctgccaacagtgcatgtcttttcttttccttcttataggatattctcttaaattactcatccgatttacgatccgattacaccgttttgttcataataatttaatctttataagatcttacatgattatattttttaaaaaaattacaaattattttcataatatatctaaattacttttagatttcattaaattatttcttagacatataaaagtaaatttaataaatcctaaaaaaggtaacttacatatatattataatagtaactcaaaataaaagaaagtaacttgtcacgacatcaaaagttaatttattgtgggggtaaaaacataagtcaaactaataattaaatttaatcaacataatatagaactaaccaatcaagtaaattgttcaccgaatgtctgaaattttttttaataaaatctaaaagtaattttaatacatgataaaagtaacttacatatataataaaatcaattatgtaatatttggttataaaaatttagttgcaacgaacatagtggtataatcagattatagatcggataaataagttagcagaaaattttataagaagaataaaagacatgcacgttgacaataataggttggcacaaaccccataccaacctagccttcagttgcataaactctggcttgaaatgataattttaccacatttagcaactggaccatcgctccttggtactaaaccaagagctctctcggttaagatttttcgtcaattgatatatcttagtttgtttcaatcacactttcatatttaaacacgagccctccctcaatttacatcctagattctccactggctcggtatcgtggttgacagtagtcg

SEQ ID NO: 52024 - DNA, 3019 bp, Oryza sativa
agtactctcttcagtttgataattcgtgttattttcaataaagatatggtttccaaagcatatatatgagtgtgattttctgttataactaggaagaaaggccccgcagatgcgcagacatcttatttactgttttatgaaataatgttaaaataagtcatatctcaccatttatacgctgtgagatagaccatagactttaatatatttaagaatgcatgttagacttaaaaaaacatcttgtcctagttccatatagattcttctacagtcacacaaacttattatcactattttaaaagttgagtaatatatgaaactatatatgtttatttccaaatccatatataaatattctaaaaacaccacttctaccgattaataggatacaccattaaaattaaaccattaaagttaaacataaatgctgggtgaagatagtcatagtcatcgagactttcttactctagtgccttgaatgatgggtctctcattaagatagccgtgcacgtgctctctcgagatcaacctagagcacaattttaatgtctaatttactatcacacccttatgtagtattgcattgtcatactggcaccgccttaactcagtgtatatacgcccctgttatacttacgatagcatagcaaacactgttgtttatgcttggtgaccctaggaaaggacaaagaaaagataaaggtgatcgacatagttgtgttttgaatcgatttgtggtacagagtagacacggtatgcttaagattttgatcattgctactcaaatttttatagtatagctagaatactctcattcataaagaagcaaggtccatcacccgatggtagttaaataattagccaaagagagacataccatcacaataatctccagagcactattgtttatattttgacaaatacctatagtttagcacctgatttgttttaacacctactgttggcaacaacatgataaacctttactaatttaaatgatgtatttatacttctaaacctatttatcaattacgtagtatatttatcatgtcatatttgacaaatatgaaattattttaaaattataattacattaattttcatatattagcccgagatgtggtgatgcatttagaatcggaatacaaattttattagacacaaatattttatttaaataaaggaatacaacaggatcacaaattggatatataatttaaaagataaccgtttcgagataattgattttatatttgatatttatattaccgatctaatttatatttctgcatatttgtggagtaatatatattttatatggtaaaaagttatattttaaagaccattgattttgttccaatgtacgtatgttttttattaagtatgtttcttattggctttatccttttttatggtaggtacgtgctttttttttcctcataatagttatatgtaaccttttttctcattttacatacgtacttatgtttttttgttctttgaccatcgaggtgcatacagatctactaagcacgctatgttttattttagcttttgtcgtacatacaggagaaaggtattatatatatagagagatctgatttattgtataaaattatgggtccaccatttaagtgaaaatcaacagcatatatctaatctaacattataaaataacgggtctaccaatttaaatgaaaatcgatggtgagattaaattttgtcacgtggcatcctaatagcatttgtatacagatctactaagcacgctgtgttttattttatctttcgtcatatatacaggagaaaggtattatatatagagagatctgatttattgtataaaattacaggtccaccatttaagtgaaaatcaacagtatatatctaatctaatataataacgggtccatcaatttaaataaaaaattgacggtgagattaaattttgccacgtggcatcctaggacctatacatgtaattcgaataccttctaattataccatattttgtatgttattgatagtcagagtttgtaatagtttgacctcaatattgtccataatttttctacttattagctgacaaaaatttcctcaaatccccgttatatgtgcctagctttcgcattcaatcctctagtgaacagagttcgagcatgaaggagggagccagaataactcaacggcagtggttttttctttcttggggaagtgtgtggacagtgacactgctggggaagcgctctttagtcctattttgcaaccctttgtcccgggttacaatcgggacgcctaatccggaactaaaaaagatgtccaatttttaagtcctggttggtgttaccattcgagactagatttagagatgattttgtcgataattttgtgaatgatttggtgctgcttgcatctattgatttcgagcaccaatgtcgtcacccccaaatccccacaaatcattcaccaaatcatccacaaaatcatccctaaatctacaaatatctacaacaaaatctacaaatcattcacaaattcttaaaaaaaaaccacaaagccacagccgttgtcggccggctggccgtgcaccgcctcctggcctcccatcccgccgcctccgggccaccaccgctgctggttccaccgggccgccgcccggctgctgcggccgcttccaccgcctccaccttctgcggccttgagtgccgccacggccacttccgccgggctgccacccggcctcccctcccgttggatctggcagaggggacgccaccgcccgctagccgcccgtctgtcgcctctgcctgctgctgcctcatgtgccgccacggtcgcttccgccggtcactgcctggcctcccctcccatcggatctggtggagggaaggccgccgcccgctgtcaccgtcgtcagaggaggggggagggggaggagggaggagaggagggggagaggttgagaaaataaggggaggaggagataaggacaagtcgcacggctcgaggcagctgtttg

SEQ ID NO: 52025 - DNA, 1494 bp, Oryza sativa
ctcacgcattaaaacgtaaaagaatatataaattcaacagaagatatcctgcattaaatttgaacgaaaaatatgcacgagaagatatcctctcgaagaattaaaattttcccgttacacaatagatgtatacacacggatgtggattttcatccctcgaggggacattcactcgttgtttgcatgtcatctaaatagtcataaaacaatttaaaaacaaatgacaacatagattaatacgaaatatatcactccataaacatgcaaaaccaaattcaacttctacaagttgcaacaaaaataacaaattaatcatcccatgcaactaggaggggtgtaaccgtgggactatgttgtgcgtatgtgcatggcataatggacatggattttcatccgtcaaagggatatcttctcgctgcttgcatgtcatctaaatagttattaaaaaaatttaaaaaaaatgataatatagattaatatgaaatatattactacacaaacatgcaaggccaaattagatttctacaagttgcaacaaaaagaacaaattaaactgaaaatagttcccgtacttttgcagttatatttgttatttttgttttaatatgtagaagttgaattctaacaaatatgtttgtggagtgatatatttctaatctatattgtgaatttttttcgaatttttctataactatttaggtgacatgcacgaaacaatggatgaaaacacttatccattaataactttaattttctattgggaatgagctaagctttattttgcatgactattatttacatttaaaaataaagggccaattttggatgagctcaaggaccatagagcaccctgagttcgaaattactgaaggctattaccataggtctgggttaaaaggttattgaaattctataaaatttacatctcgtcatttaaaagaaattaaacatgatttcgtagataagtctagagctcaagcaagattcaatagtatagttagctataaaaattgacaccttatttttaactaatttaatagctcactcgtaaactacataaattaatttaattgctcactcataatagattctgtgatatgcatcttccattttatattctattactatatgaaatatttcctgcacaactagtttgacaataattcatgttttaggatttgtttgctgctggaagtgacacaagccctagcatagttgaatgggcaatagcagaattgatgagaaatccattgtgtatgattagagcttgcactggtggagaaaccatctttcgtcggtcggccgatttccacaatagtcccggatgcaataaaaaccggggctaaagatgatctttagtcccggttcaaaagagtaatgggcatatttgatctttagtcccggtttgtgttaccaaccgggactaaagatcatctttagtcccggttcgaatgctgtcaggacctgtcaggcccccccgggatctttagtccc

SEQ ID NO: 52026 - DNA, 695 bp, Oryza sativa
aatatacaaatccatcataataactaaaccgatatatacttacttaagaggcacttagtcctcaccatgaagaaaactgcagcggaaaataaaatctagcgaagctctggctccactcccacaggcagctcaactggggtataagccaaacgtcttctccttctggatccttcttcttcaactgaggttgattgattattgcaaggtgagcatatgacatactcagcaagccacacagcaaatatgcaagtgcacaaggataccaaaggatggcataatattggctcatttgcaaaagcagcatttagcaaaacatttaagagaagtaaaacagtggagtaattaattagagattttaatcaacactgaacagcacacccatgctgcacaggcccaaccatcctgaacaaccatacccggctgtacagatctaatctccaaaccaggagctaagcaaattattaccaggtataacatccaaaattattgtgagaggtgtgagactaattacgaaaaacattgctcaacccgcccataaccgcgggcacggctattcgaatagttttactctggccagaggtgtaccactgtacccacaagacacagccccacaacatgtcaccatgtgcctcagtaccaccacggtacctcggaaaggagctgtgacattacccctcgcataacacaacccacca

SEQ ID NO: 52027 - DNA, 796 bp, Oryza sativa
tgagtctgattgtcaaacacctgagcgattgttgggttctcgggcggtggagatgaactgctgtcaatgcatagcagacacgtgctccactgatctgctcttcactgccactgacgttgttggagtcacggagaccattccttatcttcaccatctagaggggattgggtagaaatatgagaaaaggaagaaaaacaggaggcttagaaactaatctttcttataaatttaagtgcaattatcttaatcttgattgaaacactgaaaaggaagcaaacaactcctaattaaggtagccataccactcacacatgatatcgaccgccgactaaccaacaagcaacaaacctaaacacggaaactagcaagcaaacaaaactaagaaggcgacgaagctaaaggcagtgactctgaagctcggagcggcgcttgcgatcagtgaacaggtttgacacctaagatggacaagggatagcaaccaaggcatgctcaaatccaaattaaacatggcaacaaatgactcaaatgaataaccgagcatggtgatttctatgcatagaacatttttcgtgaacccagataaagaaacaaatgcaactgactaaacaataacttaatgcataaaatagatgcatagttataataatatgcataaaattgccccattgaacatagacacgacctaatgcatatcacccgataaattcccgactgactttcgaataaactccgaataaaatattactaaaaccctagactgagctaattataaagatccgatccgaatgaatgacta

SEQ ID NO: 52028 - DNA, 738 bp, Oryza sativa
tcttatattaaaattgtagtaatcatatatgctaagtctaacaatcttatattaaaactctaataatcttatattaaaattataataatcatatgctaagtctaacaattttaaattaaatcgctactaatcttatattaaaattgtaataatcatatatatatatatatatatatatatatatatatatatatatatatatatatatatatatgctaagtctaacaatcttatattaaatcgctactaatcttatattaaaattgtaataatcatatatgctaagtctaacaatcttatattaaatctctactaatcttatattaaatctctactaatcttatattaaaattgtaataatcatatatgctaattctaacaatcttatattcaaactctaataatcttatattaaaattgtaataatcatatatgctaagtctaacaatcttatattcaaactctaataatcttatattaaaattgtaataatcatatatgctaagtctaacaatcttatattaaatcactactaatctttgtcacgcccggaaatgtcacgcccggaaattcactagtaatttccgaccttatttgtgcataaaatcctcgtccaggaatcagccgaggtacacaaactgacaatttaatatacaaatccatcataataataacgttacacacttacaaaagaaaagaaaccagcagcggaataacggtctagcgatggcttcagct

SEQ ID NO: 52029 - DNA, 1157 bp, Oryza sativa
attcctgcagccctggccgattttgtaataaagataaagcctttacccatggttacccagcttctattgaataaattattgttaaacccgtgggaccaaaaacccaccaattggggaagggctttccggcccaaactgctgatcagaccgggccagataaggccactgccggtcagaccggccagatctggccgggtttcaccccggcggtcagaccgggactcaggccggtctcaccgcgcctatggacgccggtcagaccgggctctggaccggtcaaatcggcacaatagtgccgattcaggggatagattcaatgactaatgttagttatttgtattatcttagaacatttggtcctcctgtatctactgctgcaagtaatccccaagttcccccacatgttcctaatgcttataatgatgtttctagggggtatcctcctgatactaggcaaggccaatataatcatattgcgccacaacatcaacctattaggccaccaaatccaccaccaaatcaacataggccctgataatatagagcacttgattagtggaattattagggataaattcaggattgaagctaggaattgtgctaaggtttaccaaaagccgtatcttgattactatgataatgtgccatatcctcgtaattatagggttcccgaatttaccaaatttagtggtgaggatagtaggactacatgggagcatgtaggtcaatttttagagcaatgtggagaggctaatagtgatacttttaaattgcgcttattttctttgtctttgtccggtactgcttttacatggtttacttctttaccgacaaattctattcatacttaggctcaattagaatagatatttcatgattatttctatactggtgaaattgagcttaggttatctgatttaacatcggttaagcaaaagtataatgaacctatcattgattatgttaagagatttagagatgttagaaaccgatgttatagcttgaacataactgatagagatttggctgatcttgcttttaatggtttaattactcctattaaagagagattagatggccaacaatttattgatgttagtcaactcatgcaaaaggctctggctcaggaaagccgggttaaggataataaaaaatct

SEQ ID NO: 52030 - DNA, 1493 bp, Oryza sativa
ttaactaactaactaacaaacaaatggttaattgaccactgatatcttttaaaccgttcgatcaagttggatgggactaatatatttaaatttaccgtgtaacatactttactaatattacttgtagatttatttataaaacaagagtagtcgaactaaaacaatgataagttaaattttgagaattgttactatgaaacagagaaattagaagaaattcagaaagagaaagagggagaaggagagcatgtagtatgatgattgcacatgtgcagtgcaggtgcagggccccagtgtcatctcctgcacttcacttgtgccatcctcttcacttgtgcagtctttactgtaagaattttcttgcaagttgagaagaaacagacaaggggagctcttctttcataccgttgccagcacggctattcaagcaaagtctctttgactttgacctccacgctggcacttgccctacgctttgctatcccgtcccaaacgtttttctcctgtttctacatcactccatcaaaccgcccgtctaacactccgaagtacataatccgtacttcacgtcgatgcctaaaaacgtactactcccccacattccaatattaatatacaacggactataggattaggtttttttttttaacagagcagtaatatacaaggttgcacttatattaatatggtgggattaagtatttataaccatgacttaaattgagatgtacataaatcattttcttatagataatggattgtttcattagtcaataaaaacatcctacacctttacatcaactcatcaaggatgcacacatgcagtaaaaataaaagtgaaagaaagatgaaaaaccgtagtaggtaacatgaacatgtcatgttgtctagcgatattttgctctattacaatcatgaagagaatatcgggattatatgctatactttggaacaacgccttcagaaataaagatcttttgatgatgtcaatttctaaaatgtatttgaatttaatggcattgccttctaaaatcaaagtgaccaaagaatttttaaacttaattttgatttattgtatttcaccgtagtttatttttttagcattgacttttaaaccacgaatataaatataaaagctttatctataaattatttttaatatctttgtttgtttttctatgacataccagcctagcttaactgcttaagtgctcaaccgatcagacacttcgtatccggctttctataacaagcaattgtccttttaccgttttatctgctattgcttgttatagccgttacgctgaatttaccacaggtcactcacgtatagatactaatactgtagagtgagctgtagtagcagtaaacgtcgcttaaaaggcgggaaaagctaccgttgcaggcaacaacactgaactacatgccgccaattgcctgtcttcttcttgttttaatcattcaatcacctcgtcttttcttgcttaatccat

SEQ ID NO: 52031 - DNA, 2076 bp, Oryza sativa
gaaaataagaaccaagaaagcaaattaaaggcagaacagtcaaagcgagcgcgccaactctttttgaacgccggaaaaaagaaacaaaaaccagcacaaaaggtgaaggaggaagatgaactcattcctcaatcctccagcgtttacctgtcgctgaaatgggggcgaccctgcaaatctctgaagaccaggatgatattcagatttgtccatacaaactattatattgtttttgtaaaaaaaaatcagattaactgttgaattagattgtggtggtttcaactttcaggtgtggagtcaagaacaagtcatgtgaatgcaaagtgcccaaaaagcctagatttgaagtcacataggacacctatcctgagcactaactgaaatctgttgtcacttgatgcataagatttgtgtacccatgacagccaacaatggctggataatgttagacatattggttgacatcacaccaggccacgaattcctaatccctaatccttcttccttttagtgccaaagttggtgtaggagcagtaaacagcaacatgagtatgtcctaagaattcagaggtactgtagaaatgattaacatatcttcatttattttactgttctactaacttgtattagctcaaattaatgcctagcaatcctttgatgggttttgcaaaaattaaaaaaaaacgtactttttttctgtccaaactatagttgttgtaggacaatagtttataaacttttcctatgtgcgacatgattattattttgaaggtgattggaggttacaaaaaaaactttctcatgcagtagctttcagtgtgaacagtaagagaacttacacatgacatcttccatctagaagtgcaggtatcatgaagaaaaaaaaggacatggcaacaaatccatttatttcagccaaaatagattatgtaagcagcagccagccatctctctgcaatctagataagaaaagagaaaaagaaagaaaattaaagttgaggtgacaagtgcacataaaagtcttttaaacgtctaggtatgaaattatgtgatcctttcgcatcttccaaactccaatccgtctcatctgctcctcctcacatcattttcggttttcctgtgagcgatgcaaagtctactctggtgtgggcatgtgtggagactcagagaccacgattctcactgcaaatatatcattttctttctctctttttttttcaccaccgttcaactctctctttttgacacaacagcgatctccctgtcgtgttgtcaacttgtcatttaggaatatgtgtgtgtgtttttcttactggatttcacctatatattttgttcattatgatctgtactttttccatgttatcaatttgaaggtagccagggtttttgggattcactgatcttacttaccatctgagtgcacactcacaagaaccataaaaaggcccttgcatgatgcgtcttccatgtaatcgaaaaaaatagctcctgcaagacgacaaaccatttagttacccatactcttttcgtacatggtatctccaaaccttgtcacataatatttaattcagttctagaaccggttgaccccaaaacataaaagcggcaccctccatttccatctagtggtagtcaaatacgatgaaaaatccgggtgcaggctagacttgaatttggacccggcgtacatatctacatacaatttggtcaatactctcaatcttttccatgaaaaaaatcaaaacttgtccaactcatgacgacatagaagctgcatctgatggtcacattcagctggctgggtctggaagtacaaccgctgggccagtgttgatttcttggcacaccaaagccaaagaaggccacaaggttatcttcaaagtctcaagtctagtcttgttccatatgaacacttgccctgtttgtcatttctcttttttttttctcacttgatgcaaatgttgcaacatcatcaagatgttgaggcctcacagggctccaaatgatggggcatgctggagagaaattaaaaggtaaaaaaaaaagagaggacaaacgatgatgctgatgagc

SEQ ID NO: 52032 - DNA, 667 bp, Oryza sativa
aaaaaggaatataaaatatgcatgcgatggctgcagagcatggtcaacttcacatattgactaccaatgtgtcaaacctagactttcttatgcataaagtgtgaataatttaaaacttttagaaaatttcctgaaattgtgctgcttttgaaatgttgaagaaaggagacttcgagttgctatttgttaggaaatagtgcattgtgacataggctaatcaaccatacaggatacgctttgaacaaccatcattagctgtctatcaaattaagtatatatgacttgctcggtgttctcaaaagtttccaaatggtatgggttgcatttgtcactgcagattctgaactttttgtttcacacaaactgacaagaacataattattagtttaatggaataagtaaacaacttttctttggctctacatacctgaaagaaattagtgtagagtcggttttgaatcattgagctcccgttacctgagtgccaccgtccaccaatagtccaatataatcttagtcgtaagtattcagtctactgagtaagtttgcaacagtggcctcttattccactcctgcattaaaccaccgaggagaatattactgtccaaagaaactttttttcttcttcttgtcggattagcatgcaagaaaacgtgcatattatagt

SEQ ID NO: 52033 - DNA, 891 bp, Oryza sativa
acatcaacggtgctcatcagcttccgtttaggctgtttctgtcaaacagtggttcggttcaatggcttgttgggagcatacggagctccttcctgcatgcatgctaagataaattgggtgcaaaccaataaacatgtagccaacattgttcctgtaactactaagaattgtcgaaatgcaactagaaaaaagctagtgctctggcatctcctgatagcatagcaatcaccagtaggttcatgataattttcagatccccggataggcggatacgaactgcacctggcaggctagatcaccagtaggatattgatgtagttctagaatgggggtagaagcactgcatttctccataaagattattaagcaggattttctctgaatggttacaggaaagggatgaatgcagaacagagtcgaacttcactgcaggacaaacataagttgtgtctggattctaggaaaccgttattgggctattactagcatgcaggtgtttatgccattgcaatattgcatagctaggtggttaactacaagagaggtgatagtgacactaatggcccacaatcatcatcattgtcggcagttcggcacatggcatacattacccgtccagccagacagctaatctagtggcatgaccaggattcatctggcaaggggacaataagcaaaacagatgggccatgccatttgcacatatgtaggctgcatctgaggtagttttctatatggatttcaaagcagactacgttatttaaggacttctttagaacgcagttacaaaggaatagaaattttattagttagttcccacacaaaaaacaaaatctcatccattccattccaaaggaggcctaaactagtaccccaaaaatcctagtgggg

SEQ ID NO: 52034 - DNA, 674 bp, Oryza sativa
ttgcacactctaccaaaattaaaacacaatttcttcctgcctggtctactcacattatttaaaagggaaatatgctctcaattatttgcgtgaaaagataataaaagtactacaaaatacaaatactaaaggtgctctgtacgtacaaaagcaaactgatgtactgcttacttctgaacattactctgtgagtgtgtgtctagccgcaagtttttagtgaagattgtattaattgtagcaagttaaaatcagaatttcattgttaattagctggtatttgcaccaaataataatatagtctggttaaaccagagatgcaattttaaaaagaaggtagttgaaggggaagactaaccaaataggctgcttaatgctgcaacactaagggagattagtacagatgaacatagtttaatttcacactctggacagtgatagtgattgtcctgacgacgatgctgatacgaaagatctattgacatatgtacatatactattcaagaataattcgcattatatatatggtagctagtctgcatgattagttattgatacagattgaaacctgcagactacggtacaacagggcctgaaacttgtactgcaataactagatttgtaaccagcagctgcagaaagggttgtctgattaatcacttcactaaactttatgg

SEQ ID NO: 52035 - DNA, 673 bp, Oryza sativa
ctcgttgcatcatcaatgaaggcaagggagaaatgacgcatttctgaaagtgctctgctttattgatccaatgatagatgaaagtacaagttatcatctataacacagttctataattgtaagcctagtagtacatcataattcataagtaccaaggttgaagaagtaccctttcttgaatcattgtgcatgttaatttgttgaaacttggttgttccctgtagtttcgtacacatgattagtcttggaaaaaacatgatcagagtcagttgctccgtaaaattcctttagaagtacacaaatcattaagcacaagtgttatctgttatttggtgcagataaacccttcatattctcatttcttcacaataataaggtcatatttcttctagagaagtagaaacgtacacataggtatgattacatttcctgcccttgcaaaagtatagaagttacatcatacattttctttttaccatccatttcagtagcagtaaaacaacaaccataatcacctaaagcttgagggagaaaggaaaaggtgttttagttcagcacgcggtaaaatggatcaggtaaattgtaacagataatgatcaaagatcatcatccagtgcatcatcttgatcaaaaggtattttaatccttcacgtggtaagagagtaaattctta

SEQ ID NO: 52036 - DNA, 623 bp, Oryza sativa
tgcagggcatgcgtgtttaattaggtaatattgacatgaccacatgtaaatttgggatgaagtgtagatccagtgcgtggacggcacgtgttgaggaggcagaagagaattaggttcgtgtggtctgacacgtgtgtcctgttaattgccatgatctaacaacaaataatcaaggagcaaattaagcaagctagctagagtatccaggaagaaggaaggaactactatacctgctcgattgatggaatggatatgatagctagatcccttgtttcacacgcacacatgcatgacacgatcaaaatacaattaagcagttggtaaacctctcacttaatttggtacatatatatatatatatatatatatatttgcatcaataacaagaagctatagctatggtcgttaggggttggggcccacccaactagctacagatgtggaattcatgtgcatatatagcttttgttcttgccattgctctaaactggtctttccttgtaaagcaatgatgacataattaacgaaacttaattgcattattatatgtgtactagctacctactactggatttttcacattttggtccttttaaaaaacatatttcgcaagtagaccccta

SEQ ID NO: 52037 - DNA, 516 bp, Oryza sativa
aaccaaaaccagaaaattgtatgaccatgaaaaggagaaaaagaaccctgccatatttggacctacttgtaatttttccttataccttttcaaattaaaagtttaatatgcagggtgcaaagacatcctgtagactgcattgtcattttttggaagctgttatgttctttttggtgcccaaacaatagttaatttcaagggtgcacaaaaaaatctgtatgcttagcatacgggcaattcttctttagttgaccacattatgttggtttctatgagaataatttgaattgattatgcgttgagttgacatgtgacagttacaactgttactttttctgaaatcgtgcaataattttcctttaatctttgctggtgtgacatgttggagtatttagcaaattccatactaggaggcatcctctctgcagatccagtcataaatagaacctttggaaatcttgtactagcttagcagttaaaaattgattgggcatgaccctgtgtccctttccatgc

SEQ ID NO: 52038 - DNA, 707 bp, Oryza sativa
tattgcactactacattcagggaagcttgctttatgctaaaaaaggatagtcaaataagttttgtcgataattcctcatttaggcaaatattagatcatgaatttcttttaggttaaagtccatttgtaaccttaaactgtgctcaaagtccatttctcatcttgcataacaccctaaaccatattttatcgtggttctaattgatatgatagtggtttttcgctagcatgaacttcagttaagtattatgattttcgacctaattaagtaccatttgcatcaacaaaatatgcagctaggaaaaccacctccatttcaaacaaaaccactaaaaaatatgtcccaaggtgtttcttgtcccattaagagttgaaggtgaaaaatatccagttttctagtgaaggtgaaaaatggccattggccaaagtttaaaggctataaatggactttacccttagtttttattctttggatgaacaaaacaccatgtcctaaagtaaccaactgtatatttatgccaaacttgagcttgactgttgatattagacgattcagtatatctttgatgcttggacatgggtatctcgtcacagcattgcacatttacaaggattcagaagtcacaaacatggtgacatgggtatatattttaataacatgataaaattaattagagcagatcttgtttagaacgttagcacaattc

SEQ ID NO: 52039 - DNA, 809 bp, Oryza sativa
ggttttttccctttaaactgctgcttttatgctgtttcctattatatctcttgcttctctgtatttaatctcttgcatatatttaggtcacgctcctgctttaatcttggttggccacctgctgaaggttctaaatttttgcgcaagcctgctaagaggaaacgagtaagtagtcatccatagtattttagggctagcaatgtggctgtgtgagttgcaaacctatggaaaaatcagcctatgtgtgctttttgtatcatttgagattctcctttctatcagttagccaacagtactttcgcaccactgggattagtttccttagagatagattgtgtaacattattttttttccgtaatattagataatagatcagaatcctatgtattaatttggaaggttgtcggtttaattagtaagttagagatagggatgaaaacggatcggaaacggacggaaactagctttatcatattcgttttcatatttttttcggaattggaatcggaatcgaaaactcggatacggaaatgaaatcgaatattatcgaatacagatacggagcgaatatgagacggaacgaatacggtagcgaatatttaccggtatataaaaaacccctcaaattgagtttcttgatcaaggaagagatatcgcttattattttagttcaaaatctccaacatttatatcgtcaattttatagacggtcccacaaccatatgtgaaaattgattttcatggctgttcctcttaagagatccatatgcaaaaaagaattatcattttctattcccaagccctttta

SEQ ID NO: 52040 - DNA, 693 bp, Oryza sativa
attcctgcacccctttcggaagtttgggaactaaacacagcctatatatgtgcagtagaccaagtgaaaaatgcattctgttagatgttctcttcctttgtagtttcaaactttcaaaaatgcattgactaccacttctgaaactattcatcctttaatttagggacctcaaagagaaagagagagtaataattacactcgtatagtgcataaacttacatggggtgagtgaaacaatttgcaaaatgtgtttccccccttttctattttggcagagtgcatgttttagtagaacaacttaattatttagtctgtgtaaattagggctaaaattggccacacaaattaatgaactgagactattttgattggaacactcatcattccaatttataattaagttgtctaatctgggcaatttacaatccattgtgtcttggccttatatatatatttccttcatgtgggtagaaggagtactggggacagcagaggcaagctcagtgtaaggtggtcttgcaagccaacctggcatcctagctagtcagtatagaaaatcaataatttgcctcggagacatattttggccttgtttttcactgactaattacaccggaataagaattttgcatgtttttaaacgtattttcacccactgtgcaagttcaattcatacaacgtattcgtcagtat

SEQ ID NO: 52041 - DNA, 2005 bp, Oryza sativa
cccccttaatactatacaaaaatgcccagctagctaggtgtatacgtatacacatttaagctagctgcccttaatacctaatgattcataatgtatagccttttatttcttttgtccaaatagaacactaaacaattcaagaaatgataaagggacccacacatctcctatgaaggtttctgtgtgctgaaaccacgctgtttcatctcccagctagctaggtcttctgatgatatgaatatgaatcatttggacgtggaaaccgcagataattcagcacttgacctttgttttattcttaattacgcatgcaccctgtctaatcatctttgacaggattccagtgtaaattatctgataggtgaatatcagatagctaagcatatatatgcatgttccacaaagttcagagagtttgcacgcgtcatgggtgcaaatattgcctattggccataaaggatgcatggaatcaagggatatcccaacatatagtgcatatataattaagttttaagatcgacattctcatcccaggcaacttcaattcgtctttaatcttgcaaactaattaacacacaatatacaaatttgtgttctcgaaggtacttcccataaagatcaattatacatggaaacgacacatatgactcctcacaaaatggatcaacatctgagcaatatagtgtaagtttcaaaagtcaatttgccttgtgttgtggatatgccattgtattgctaactgtaatgctcatgatctcccacaacagagcgcaaatggtgctaagtcaaccattcatgtgtatgtactatatatgtatatatagttactagctagtatacatatattcttttttgggaaaattggaactatgccattataattttgcaaaattttagatatgccatcctgacccacatgtcattgactcatgtgggtcctacatgtcattgagataccgatggtatatctcaaactttgcaaaattataatggcatatttctaaattcttttttagataatggatgaaactaatacactcatatactattaagttcgtttattagcatatgcgattataagttttaaggtcgatcaattatttttttcattaagtataaattgatgaattaattagttttctttagttcatctacttgcattctaaagcatcatctttgtgagagcaaattaactgaggttgcactatatttaattatttcccatgcatattcaaattaaattatatattcgcgaaaacaaatatcacaataaaatcaatattccatacaaaatggatcaacatataattagcttgagctaaaaaaatcagaattcattttactatatgtttgtggtgaatgctcctatatataatatataatgccaataattaatattgggtagaatttgtcactcccatcccatgcatacgcatatatatagctacgcatgcgtgcatgcagttttcacattttggtccttttaaaaaacttatttcgcaaatagacccctaaaaaaactaatcccagaaatggtcctttttagggcgccagagtggctggcgctgccatccaatgggacggcgcccgcctctctggcgccgtcctcctgccaccgtggcgcacgcgaaccgacgtggcaggaggagggcgacagcatggctggccccgccgcctccattcctgtccattcctgtttctctgtatggagttgcaacggtgtcatttttttttattttttcggatgttttttcacactcaggatcacgatacaaccaaccacaaaaaaaatttaaactcgaactaccacttagctaagtctgaaaatatctagcataccacttagtctactttgcaccttcactaaaattagactataactcttttagtaaaaccctttgatcagcatgttaaacataatgcactctaccactatatgaaattacttaatctaattcaaaatataaccacatgaaatgacatatataagttaaacagtacatag

SEQ ID NO: 52042 - DNA, 968 bp, Oryza sativa
caattaatagaattaatatagtatgcacaccacaggtggtatatagtatattaataaagtatcattaaaaaaagaaaagaaaagatggtgtcctttagtttgttctctcttgctaattaagtttcctggctggataattaagttgtcaagcgtacgtgtcaacgcactatattgtgtacgtaacatgacgtccaaatcatgcatgaacttacttgatcagagaggtgtttttcttgtatttttccaagtaacacgtcgccctcgtagacgcacacacagtagaaaatattactatcacatcgatgtactagtatatatgtatgctaatgtgctggcctttttcacatctatctttgtacagtatctaccatgcatgtctttatacgtagaaatatatataccattatcaccatcatccttgcatgcatccacggtacgttaataaaatcgtacgtagggcaaagttatataaggagtatatacgtacagaagtacgtatatatatatatatatatatatatatatatatatatatatatatacactgatccttatatatactagtagtaatatatatcaattcgtatgctatagtattgtgagcttatattaatataattgtgcatgagaaaaataatgtaattggggggatcctaaataaaaccccacttgcattgggccatatatgtatatgttcaaaagtcccaaataatttaaggtacagaaagtacggaggaaagaaaaacaggacacaataagcacacgacacccagagcaaatgcatatcgatctaaccttagctacctacattgacaacatgcttaagcaagctggcccctgctctctgctgctttccgttggttcgttggttgcatgagctaatggctaatcacgatggacgtaagtctttggactaattgaagtccccaaattgaaatcaattagtgccaggcataacagtcagagct

SEQ ID NO: 52043 - DNA, 932 bp, Oryza sativa
ccccaacctagataaagatggtattgtaggcggtatcagcgacatccagggtggatagcttcggcctaagggcagatccagtgccctgacaaaaggcggatgcagtgagaaaaacaaaaagacgacgggcttgttagtggtgccagtggtgatcagtatgcagggcggctatagtgaggagcaatatcagcagcgtggtagtaggctggttagcaatgacagcaacagacaaccctagatctagggtctaagtgccatggatccaaggtgtttccgtgtttgtgcccgaactcaatgcaccaaagagttttcttcttctctacctccgctggatggcatctgagagcaaatgcactagttcttcacttctttgcctccactcgatgatgtcagcaagcgaaggaagtaagtgctgggagttttcggatctagatcaaatggatctgtccaatagtaggggtaggtttgcgaacaaaccagagagaggtgggtgaaagaggatgagggtataggagttttgactacatttcaatatttattcgatacgtttttggtacaacaaggctcatcaggcagcagaaaaccaaaactgagtattctagtattttttgttttcttttttaattttttttgttgtttattagttataagacctggaatataagtattcgtgaaacctttacatatgtatatatatactccggattccatccattatccaaaaaatctataaaaaccaaatgcttctacggttaccattattctcgttggccacaataatattaaggctagcttcaatgtttcatcttgcagagactaatcaaatagctagttggtgcaagatgtggttacttatatatgaaaacaaaacagggatccaaacggtttaagtcaaatgaacagaaactcaagaggattcctcaaacagctgc

SEQ ID NO: 52044 - DNA, 1678 bp, Oryza sativa
aaaagtgaaggaatttgaaaaccgactcaaacacggatgacgtactaaaatattggcaaaaacattttcaatttttataatagtagagatttggtaatattttattcaaatttgaccaaattttgttcgaacttttggaaatttcggtatatagacaccctttgctagaaacgccgaaaacaaaagattgaaccctgccttttagtagtacttactaactacgtattactacactcttcatcctaaaatataaatatttataattatgaatttagacatgtatttgttcaaatttatagccaacattattatattttaggatgaaggcagtacatcatacaattcacaaactatagtagagttaatacctccgtcccaaaataatggtcgctttgacttttttcttgcgacatttgaccatttgtcttatttgaaaaattggtgcaaatatataaaaaaaataagccatacttaaagtgcttttgataataaagaaaatcacaaataaaatagataataattctataattttttgaataagacgaatcatcaaaagttaaaaaaaaacttaaagggacaagtattttgggatggagttagtagttattattcagaagtaattagtaattgattttgtgcaatttatcactcgcatgcattgccattgcttaattaccttgtcctaatttgtatttgcaatgtacttagactcgatattcgattgaattcatggaaaaaaaaggatgcgcacgtagcatctgatcggcaatcaatcaccaaattaacataggttatagagatcggacagcttcttcgccttcgtatcgatattttacggtgccgatcgaataaattattttagttaggattgaataaattattcggagtcatgtgaccccgggtaatcgaacgtgggaacaccactacccgtatccgatgggaaatgtagctcttgatgtttttggcgccaagatatcaatatatggccattatatatcccccatagaacaatcacatatactccctccgttttgaaatatttgacattgttgactttttaacacatatttgaccgttcgtcttattcaaaaacttttgtgaaatatgtaaaattatatgcctacataaaaatatatttagcaataaatcaaatgataggaaaagaattaataattacttaaattttttaataagacgaacgataaaacatgtgcttaaaaagtcaacggcgtcaaacatttcgaaacggagggagtataaggaaaaaaaatctaatacacttaattgtctctgtaggaactactagagggaattcagttctaataaatcgtcttggtccattataaggcattattatgcttcagtaataaatatccatataagtcgctgcctttctttcactacgctgacaaaaatgcaaatgtttttttgcttctggcaactgtgcttctgttccgcaactaaagctgtatcactatgtgctattttattctgttcttgtctgatgattctatttttatgggggaaatgagctggacatgcttgtttctatggtttacaactgttgtatgtctattttgtttatctctattagtatcaagagcaatttgccaatggtctatgttataatcatcatggtttatacatctttcctatgggattaaattgaatggtaatt

SEQ ID NO: 52045 - DNA, 668 bp, Oryza sativa
ctgcgaagggcttaagggctactggggagattatggggccccatacccacacggcatggttatccgactagttataggagataactcatatctatgaaatatgtaacatatcatgacttgggtattacgtttccttgtatattacggaacggtctaaagtcctggtttgataagattgtaaagtagatttagtaaaccgataccgtattggttaaggtttctatcttataatcctgccctccatcctatataaggtgggcaggaggccctctagggggcatgagcacatatgatcgtcagatctatactacacccggcggattcaaattcccaaacaggagtagggtattacctctcattgagagggcctcaacttgtctaaatccttgtctccgtatccatccacttttaggtctcgtgcactaccccttttattattgccgaattcatgtttcgacagttccagacttacattatatagctgacaatgttatgtgacgcatgagttgcacaatatatatatatctttaggctaaattgtactatgaatgttgttgagagttgtttcatgattgacttcgttagcggaacgccttggcattgcaatttactttaccttctcttagcgatcaagaaggcgcatgatagataggttaacactagtttcc

SEQ ID NO: 52046 - DNA, 761 bp, Oryza sativa
ttttttttttctaaacatgtaaattataacagcaccctattctttgttcttatccattgcagcatatgtgttgcttggattaacaaaagacagatcgatatttgagttgctctaaagggtagattagttgaactcaattattatagggccaccaaaaaattcggccgcacagagcaaatgttagaccacaaagccgttacaaatttgtcctaacctaatcagaacagaaggcacaagcaaagccccagaggagccgtaactgatttagccacaccagaggaagcaggagtcacgggggcgagctcgccgggatccctacgaagcccgcggagcagcctctcctcctcctagaagtgtggtgatattgccaattgaggttcctgagaaattattgcttgtcaagctggctgaaattattttgaacagatataattagacagggttgtatatatgcatgcaattctaatacgaaatatcagagactattcttgaaaagaatgtgaagaaaatgaactgaattactcagattctgtggatagtttaattaaacacgcaatatctttctttcagttaattctgacttcatgcgttcttaataggaaaatcattcacactgcaagttaaactaaaggaagcaatgaattgtccgatcatgttggcagtccattatttctccgccgtgttcagcacacatcacgtgcaggaggaggagactggaccccaagccaacacagtacacgtgaaccctttgtagatcaaga

SEQ ID NO: 52047 - DNA, 671 bp, Oryza sativa
agagatgtgtaccgtctggggcagctgtttgacttctttaggatgcttactttctttttcaccacagttggttattatgtctgcacaatggtaacccctcgccccaatcgcacatgattacgcttgaagcaacttacatggtctatgtgatgaaccagctcggcttgaacacttgagtacatgtgtgcactgcatccagacaattatttgattgatataattgctgttagatgggatgagagcgacaaattgcagttagctaatcatatatcatggtttggtttaattgcattgcactatcctaaactatcacctgtttgcttgagatcaaacacagggatcaagatacgagaactaggtctaaatcatataccatgaatgggtttacaccaagttaggccctttccagggatgggccgggaatttatttcaaatttctggccaactaaattcctggaccatccagggaggagccaggatttggtagtttggcctttgccaaacaaggtcttaaggtttgaggatgcaacatctagttgaaggcttaatacacctgtttgctgcttctcttttttaatcaatgggggtggagctttctacttttccaaactctcatcgagtgatacgcctcatattttaggataaaccctcatcatattttagtataaacc

SEQ ID NO: 52048 - DNA, 557 bp, Oryza sativa
aattaaattagcattgtttagttcggcctcattctatctttaaaactagtatatgcccgtgctaacgctacgatctttaatattttttaataaatgactaaaattttgtgttagtaaaaataatcagtttaatgggagctttaattcaaattatgccatatatttaaggcaaattacaaagtaggtacttcacattgttcgtctgaaataccaccaaaatacacactatttctctccaatagcaatttactttggtaggtgttccctgcacctgtaagtcatataataacttgtcaccatgagctgaatcagaggaacgtaaaatatcccttatcctaaagttggcatcaatatagaatataatgctatacctcactttatacatggcaatgtctccaatcatggccagctgcaataaaattagatattaaaccctagccaatgcatattagccattcttcctaaaaaatatatggcaaggtgtcctaccatggcctcttcatttctctacaacagacatttttctaggtataaaataaagcaccttctaacattat

SEQ ID NO: 52049 - DNA, 1848 bp, Oryza sativa
gtggggcccaaaagtgcccagtgggccccacttctgggccgatcgcgggctgcgactttagggagaacagccacgtgtggatgacaagtggggaggtttggatcgtccgggcccactgtcagtgacacagatgttcaaacttggtcggttcgtgggtcccacctcgccgcaatttttccacgtagtagtctgttccacgcaatcacggggctttggctttggcttgctctgccttggattgcagctagtggtttgtgatgggaacctctccatttagccgcgctaatcatgaccaaaaacgcaattagaaaagagagaagacagtgcacgcctagaagcattatagtgcctactccttctatcttaaaaaatactactaacaattactaatatattgttataaatctaaatagattttctattacttaaaactaatactagtactaagtcatacttcctcctccgtttcatattataagtctttctagtattgtctacattcatatatataataatctagacatatatgtttagatttattaacatctatataaatatggacaatgttagaaagttctttaacctgaaatggaggaagtatgttgatgtattttggaacgatgaaaatagtttattcggtcagtgagccggtggtggttcagtgatcagtatcaacaaggttgctgcgctttcgcttgctttatactaccacaaaatcaccaatgcttaggcgccgcgatgtggataagcataataagccataaggacacgccaggtcaacagcaagtggtgcactgggagagaagatgctttcacattagaaggtactactacttgtgcataatccgatttgtctgaactttcatgcagcttgttctgcttgtgtgtgtttccttgttagcgaagaaacttgagaagtttcaaaagaaaaagagaagaaacttgtgagaggtaatcctggccgttggagcatcatcatcatgcatgtttgcgatggaatgttcgcgttacctcatcaggagcacgtcagcgcgagcgttcgcaatcgcggtttttttatttttatttttttggtgcgaactcgcaatcacaggtgtgcgttggcagctcgggttaagtggggtttgttcgaacggagggaaggcgtgaaaattgcggtttgggctcggcttcccgaaatcagattcttgcagtctttgaaataagttcaccggaggtccctcaacttaacagcgagaattcttgagatcccttaaccacataaccagaaatgtgtacccctaaactcacacaaaccgttcaaaggaggtcccatgacagtatatgtgggtggttttgctgacgtggcatcctagtcagcattttttttaaaaaagtatgtgggcccacatgtcagttacacatattttcttttcttttcttttcttctcctcctcttctcttttctcccttctctttctcttcttcttcttcttcttcttcttcttcttcttcttcttcttcttcttcttcttcttcttcagtaagtgaggctggtgggcgacgggtggagcggcgatgggcgggcggagcggcgacgacaggtccgtgcggcagccgagtagcggcaggcgagcgcggcctgcaggcgagcggacgagcatggcggcaggcagagcggatggcgtcccatgccccatggcgtggcggcggagatatcggccgatccggagtccaggagcacggagagtgtgtaggactcgtcgacggcggggccgagcgagacgttgggaccgtcggagacggagagcgcgaggatgcagacgtggatgcggacggggatgcgggagagggtgcagttggtggggg

SEQ ID NO: 52050 - DNA, 2443 bp, Oryza sativa
ttctgccagctttttattggaccacgtggtgcagtaattttttcgatgtgggaggaacatacgtgctcttgatccgtctggatagatctgtacgtcttgatccgtctggatagatccgtacgtcacgctgctgaaaaagggaaaaaggaagaagcaatacgggttcacacacaggctggcatctagctgggccttagattgcttgggccttgctggctggtgaatggtggtcaacacgtaggagtaagggtgcaagcgggcaggcccacgaacccacttatagtataaataagcgggttatccggcgtattatggattacctgcttatttgtactataagtgggttcgtgggcatgcccgcttggtaggagtaggcagataaagaagaaaagagaagtagaaaaaataaaataaagaggtacaaatagttttctgaaattatgagtatgatatactacaggttaagctgtagattgaagcaagtacggtaactacacagacatcctgtatgtctataaaatacgcctaaaaacaaaaaatagaaaaattaaatgtcttcgatcgaacttcttaagcctcggaaatctttttcagaacttatattccactaatactacaaatttggaaggtttatttgcaaaatttttgtgtcttatgaattcgctgcagttttgagaaaacatatctttgtttctccctaatggcatataatcatttgccaaagttaaacacacatccataactcaacaaaattattcacaaatataaattactatgctactttgatccatctcaacattgcaaaaatatttaaaatacattataaggtcttgtggaaattaaactttttctatattatgtacgggctataaataaccggcacgcctaaaggtgcgctgattttctaagacattaagaattaggtcaatatttattgattatataccatcaacctttgctgtattgcatgatcagtgtgtggatgggctttgcgctttggctattgttatttatggttaagtgctaaaatatcctttgtttgaccaaataaccaagttgctaggtttatgcactctacatctactgtggatagaagtaagtgtctgaaaaagtttgatctttgtttttgtagctttatttgattagccagctttaccattttgttattatcaggatacgtttcataatgtcattctagtttctgttgcttcctatctttggttgtgataagcattcaggccccgtttggctaatgggaaagggaaatcatttcccacccactaaaagacatctttaaatcctaaccattcattctccctcttccatttaatcctaaccctttattcatttcccaatcccaatctcaccccagggttaagatatcttattttccctgcatcagatactcaaattaaagcattatttttagtgggtaaccatgtttttcagaaccactcgctctgatgacaatttgttactgctatccacgctcatttttcatatcaagttcagaaactgaaacttccgccccatatagcctgctgccttttccactctattgattatttaatgtattatacaaaacaacctaatcgttgagggatctaattagtctgatgtgttttgcaccctcttgaagtatggtgaatgactgctaatttttgtgacacaagaaatgggaaaatacatgctaagtggactagtttaggagtctgggcggctgggcctgatgaaagttctgtgcgtctcctttgcagaacttagaatctattccgcgagaacactatattttcaaacggagtattaattttggtacaagggctggctaacaatgcagggagagggagcacgtgcatcagtatacacagatgaatgtgcctctgattttagctttcttgctataagttgccctcctgttgtaaattgggcataagtaaattttttctattttgttttgcaaaactattatagtaagcttaagcaccccaatccctttcctgatgcagtgttgatggttttgcttgcaggggcgagggacattgtttggagaagaggtgcgccgcggcaatgaagctagcctattccgttctattcacctatcaatgacgagaagaaatgttggattttttcccccttccttaattgtggcatggatttactattgctggttttggggtcctctggtggtgtagagaattttctatgggggccctttttttggtgacatggacatagactggtggtgaaaaaaaagaaaggatggtggtggggatgttatacattttaagtactatatgttacttgtcatatatacatatctgggagatctgcaagctctcctctgatggttggcgttggcgagcttaacaaccagtgcacgatgagcgtcctcttttttaatagcgatcggatcgcgtacgtgctctcttagaagcatcaactt

SEQ ID NO: 52051 - DNA, 2172 bp, Oryza sativa
ttacatgtttctaattttaaagaatgaatcaatgttaaatggattataatgtgtttagtatttaatttcaaaatatgaacttgtataaagaaattaaaaatgacagtggattatttagatgatgaatgataatggatttgaatttatgtttcacttgtaagttactttgatttaactaaaaaggcaatttattttaaaagaggtagaacgtattttatttataaaagatctgtcattatctttttagctgaactaatttttcgatgtgctataatttcttttatgaacatgtaattttaacgttgctactcctttcatcccataaaaaactaatctaatactggatgtgacatatctagtactataaatctggacatacctttgtctagattcattgtactataatgtgtcacatctagttttagattcgtttttttttggacggagagagtactagctagtgattgtggggctggctggcccaagcattggggcgcacaaataaatagcgccatggtgcgagagagagaacgacaagggtatatctatactttctatatagttggtacccactaaattattagaagctaaagcttaacatgcaagcatgccacatcatcacccactagcaattactattctagcctattttaatcccatgcaagcatgatacatcatctacaatattatattatagagatcaacaagtatatgtcaaatcatcttcctcacattattttctcaacatttcaactatcatcatttctacaatatttaacatatatttatccgtgaatcccgcagcaaagcgcggggtatcacctagttatacaaaaatcaaacccgatcgagtctcgctttctcctcgcgtccgatgtttctccgtctccagtcatatatatttgaagggaaggggccgaacaactcttccttggtttttgtctttagtttttttttctccgtagatattcggaatttatttgcgaagttagggatgccacgtgctcctggcctaacgggcagctttagaaaagtattctatatatttcatattacttaaaaaactgcccatgcctggcaacgatgagagctattttaatcctattattgttactagaaaaatgcccatgcgttgcaacggacgaagtctattttaatcttattattcttatatgatttagttaagatgaaattcactgtgagagttcgcttggatatatatatatttttagaaaatcataagctgcagttaggagtccaatcgtcttaagttagcatgcgagtttttttaaagagatttcttatatgatttcttctgtattaccaaaagtgaacaatcttaaaaaccgactcaaaaacggatatgtatttccaaaagcaaacgaacttaaaaaccaactcatacacggatgacgtaccaaaataccggcaaaaacatcttcaatgtttataatactagagataagtcgttgtttttttcataatcaagtttatagggtttaatatttcaaccaaaataaatatattatcatatatatatatatatatatatatatatatatatatatatatatatatatatatatatatatatatttaatgctaggtttaataaaattaattctataaactcgagtcataatacaatttgaataattagtagcattctttaacaagacggggtgtagcacatatggtagagcgctcgcttcgcatgcgaggtgcacggggttcgattcccggcacctccatttgtttctggtttctatataattttttgttttgcttctatacaatttatgatttaaggtcatgtactcaatcacaccccccccccccccccccaaaacaaaaaaaggatgttttatttggagaaccgaaaaagaaataggagctcccggcgaggatcgaactcgcgacctttcgcttacgaagcgaacgcactaccactatgctacggaagcggttgttgccggtttgccgctaactttttactacaacttaaattttgtattaagtatattacgggaactgcctgtgctgtgcttgtgctgttgtgcacgcggttgtgccctttgcctgcaaacattaactgttcttgtgcatggattgcttttatatgaatataattaattggacttatttgtaaaatactttctctgtttcacaatg

SEQ ID NO: 52052 - DNA, 563 bp, Oryza sativa
tcagcgtcctcccccgcgagcggcgacgggggctctcccaccactggcagcgcggctgcgtcctccctcaccaccggcagcgcggctgcgtccttccccaccaccggcgcgcggcggcgtcctcccctaccaccggtggcagggcggcgcccttccccatcaccagcaggcggcaacggtggcggcgcccaacccaatcccaagcaacggcgacggactcgatgtatttggagtttttggtcgatatatttggtgtttttgggtgttgaagtttgggtttctattttttttttcaattttttcgatcattcacaaaatcgaaatcagattaggatttgatggagggacgaaaaatacgaatcttttaattagttaagatagagaagagatatttacggactattaaaacgaatagaaatcgaattttttgccgcgcttttttccgccctttttattttttttttgttcgttttttactttttactaaccttttttttttgccacggaatcgaacagacctctgtagatgtgaattttttaagtagggacaggagtagagatac

SEQ ID NO: 52053 - DNA, 687 bp, Oryza sativa
attcctgcagccctcatttttatttgagagggactaccccacatttactagtgcaagggaaagcaaagctgtcaaaccaggggaaccagtccttaggtcaactcctttcagaatattttccatagtacagatgatggcagagtgcaatttacctctgaagtgggcacctagtcgatcaaaaccaaagtcaagaatctgcaacccagacagtaataataccagatcaaagaatacttaaaaaatgtttgttacacaagcaataaaggttggagtgcaaatatcaacactctgaagtaagcaatcatgtgctgcactctaaatttgtgaaacataacaatatgtattggtatctaatgtcataaaggatatgtgaactatgaaagatattatcattaatagctatagaatagagcatactcatagaagcaagttagaatatgaatttctaacttcagataaagcttttcttaatatcagttaatatacatctcaaccacagttaagacacgtatcttattcttaaaatgtttcatatgcattattctggtgagcctaaaaattaacacacacattaagattgcattcagaatcaaagatgacagaccagactgatcagttcaagctaaacatatagcaaaccatctatagatcttgctaccaactcaaacaaaaaaaaagttaagatgg

SEQ ID NO: 52054 - DNA, 592 bp, Oryza sativa
aatgaggtttgtattattaaaattagcaattaagctctgaaaattccaataaaattctaaagagcttaattaaatatggagaatttaataaaattaaatttaacctgtcattttatttattatacttgctttacttgtaaattaattttttacacaagggagggaatataacctttctacataatgtaaatttttcttaacttttcctttattttctggtctatacacttcccgttgcaacgcacgggcacttttgccagtggaatataaaatcctggagttcctcctaggtgtagtagcaaatactccctcaattttactatacaatttattctagcatttctcatattcatattgatgctataagataagagaaatagtaagtaacaacatagccatggaaagttggacacaatactctgctctaccattagcaaacaaaatctgaaagccacgtcactgagcagggtacctatttcatcacaaacacatgcacatatatttgatcctcgtacgaaaacttacaaggaaaaaaaaaaaagagatcgtatgaatatcagcgaattttttttcgcgaacgcgaatatcagcg

SEQ ID NO: 52055 - DNA, 1618 bp, Oryza sativa
gtttctacctgaagcaaccgccgtggacacttttcacaaggagggagaaagatgctctttggatgcttcaccatgccacatgtcaagaggagagcaaaaatgctcctaggatgcttggagcatctccacactcccaaggcacctctccacctataaatacccctcctctcattcattccctcacacacctcaagaagaagatcaagagctctctcaagtattgtttagtagttctacagatagtggagtaggaaatagaattgtcttcatagtcctcgagttttcaggagatttcgggtatggctttaatagctttcctctcttcttttgtgagacttattaaattaatagaatattcttctttatacaagttcggtattttattccattcatattacttgagtgctgactttactttatactcgtgtaacaagctttccagataggtgtattgatgtgggtttagtgtccgattattcggttgctctaggtcggttgcaaggatgtagagtagtattttactaatgtaagcgcggtgcttaaattattaggtaccactaattggggttatatactgcggatgagaggtgggccgctgatggttacagctaagtacgggtattcctccgcgccagtatataatcctaagttaattacttggggagggtactcctccgtatttagccctggttgtatggtcatgacgggctagggtggcttctcgaaacaccaagaggacactgggtacggggtattggttgcatgactgtataatagcaagtatagactaaagatgtatgtatactagaagtacaggaatgatacttttcttattctttcaccacttagcttagactatattttagagtgagtatttcttagttctttcttctgtgtgtcaccctaccctttgaactgagttaacccctgcatagactttgatgtatataagtaacatataaactattaccatagtactctcttatcatatcttcccttgggataaaataaatacgataccttggaatactcccgggtgaaatgctacaatggtatatccgtgcgcttgcggatcacatctgtaaccataatataccatgagtatttctagtgctattgctggaaattatatttccagtagtgccactaagaaataccaaacaagcatttctggcgccgttgccggggaagataaatgattaagagttcactacttgctaataattttatatttacctctatataagtcactgtcctttgtaggcaaaccttgtttgttttctcttttatgtaaaacagggtagtacaggactggttatgatctgccaaccaaattcatatctagagtcactggtgaagtgaagccgacctcgtgtcgttcatcctcaaggttactctatcggcaaccagaccagtcaatttcgcgccacaagaattgcatgatacggctgagaagaccctttgcaagtttgctgctccctctgttggataacatgctacatggaacccacgtcagatgggagatggtgctttgatctgaaaatctgcttagtcaagatggcgcaggcttgcacattctgtggcaagcctaaggaggatgccagtggttatttacagc

SEQ ID NO: 52056 - DNA, 1738 bp, Oryza sativa
caaatacaggttggagcaaggaacgactccaaacccgtcaaacgcggtatgcacaccgtcaacgagacggaaatgctcgccgcccaattggatctccttatgaagagaatggacaacaatgagaaggacgccaagaagggtaccgttaaggccttcgacttttcaaatggcatgtgaggtctgtggcaatgacgatcactctgggacggatcgtccgaaaacctgtaaggacgtcatgctcatgaacaacaacaacggatatcgtccacaaggagaccaagtatggagcattgctccatggtctagttcaagaacggaccgaacccacaaggaggtcagagtgaaaccccgaaggacggatagtctcaacactttcatgatgaacttcctgtagcgggaagaaacgaggagccgtcaataccttaagccggcatccaagaagccaggaatataggccggtcaacctgcgttcccagttatgaagaggccgttgccgcacctaagcaaagaagtgtggcagattaaggaaaaaacacctgctcctttacctccggaattgggtgccttatcgagctaaatgcatcggaggtactgtcgtgctcgtcagacttgaaatgatgtcgcccttgccaacaggtaaattggtagttatttcatatttattttccattgcatcaaagcatgtttgaatttttcaaacgcagcaaaataaaataaaatttttggcaaaattttgcatggccaccaccacactagtcgttggaacccaatggctaaatgtggggccggttgggtccaccaggggttcggccgaacccctgcatggcactggctggctgcaaatttctttagggtagcggctagtggggcccacatgccattactagccattatccatgcactatataagcagctcggctgggagagggaagtcacaccactctaactcattctcactccctctcaaaaccttcctctcaaaattcattcaaagttttgcaagcttgcctcaaattcacacaatttgctgcatttagtttagacactttacatatacgagtttgctttagttcggtgcaatgttaatcggtgggtatttgtttaacccccgtccgagtagtcttgtattcttgctctttgttgtagctatgaagaaacgacttccgggcatattcaagagacaatcaagctcacggacaagccgacacgataagccgagtacaccttcttctgcggatgcatccatggagaaggcgtacgttccaccgaggctgtacgacaactccgatctcgaccttgtgggcgaccgggaaatgcaagcctatcatatgctgaaagaccgaacgtgtgctcagacctaagcatacaactcgacctttttgaaaggataagtatggatgctgagtttcatactgtttgacgtgctgttggatggaataaatttgcatgtgtagatgagccgggttcctgtttgcttaacatgcagtttttatgtaccttgctagaggtaggtgatggggtactttctggttattccgcaaggaatatcacctttctcggaaagaccttagcttgcatctaggctttgacaaaacatgcaaagttaatttcaggaacgcatttcttggtttttaacaagcgtatgttttggcaaagtatttcgggtctcatcctgtaaaaagcctagaactagtgacatccataatcctaccctggggctattgcataggttgcttgg

SEQ ID NO: 52057 - DNA, 532 bp, Oryza sativa
tatagggcagttatgacggttgtgagaaggggaaatgtccgaattgtcccgcaaccattattgggagagcatctggagcgtccacgccaaaccctaggatcaacggtgatcggggcggtttggccgaacctgggctgggccctcctagcctagccttcggtcggtggactccctagactctcctctgtctatttctcggagttttgggttgatttactgatgttttgatgaagttcacaacccttccttgtatggatacataattctcactttagtctagatttcctcccaacatcagggtttatcatctgcatacaaatatacaccaacacttgtggaatatgtgagattaagcacctatcactatgttggatgttttattatctaaactttatgcagatgggatttttataaattttcgcaaacaagctcttttcctcatgttgacttcctctcttgtctctcaaggatgtatattttctttttggatcctcaatcaaggcaaagtgtgccaaaatctaccctattctaa

SEQ ID NO: 52058 - DNA, 1477 bp, Oryza sativa
tcgtgtgcgaatatgggcattaatggtcaaaagttcccgccgggaatcgggaagtgagtttttgccacgaacgcacccaatacactccaaaatgtccaaaaatggcgtttttgaactttttgattccggtcaaaaacatcgcaccctcgtgtgccaatgttggcattaattgacaaaagttcgccgcgcaaatcacgaagtgagtttttgccacgaacgcacccaatacactccaatatgtccaaaaatcatgttttggcgttttttgaacattttgattctggtcaaaaacatcgcacccccgtgtgccaatattggcattaattgacaaaagttcgccgcgcgaatcacgaagtgagtttttgccacgaacgcacccaatacactccaatatgtccaaaaatcatgttttggcgttttttgaactttttgattccggtcaaaaacatcgcaccctcgtgtgccaatattggcattaattgacaaaagttcgccgcgcgaatcacgaagtgagtttttgccacgaacgcacccaatacactccaatatgtccaaaaatcatgttttggtgctttttgaacattttcattccggtcaaaaacatcgcacccgtgtgggccaaaatatgccaatattgacattatttgacaaaagttagccacgcgaatcacgaaatgtgtttttgccacgaaccacccgatacactccaatatgtccaaaaatcatgttttggctttttttgaactttttgattccagtaaaaaacatcgcaccctcgtgtgccaatattggcattaattgacaaaagttcaccgtgcgaatcacgaagtgagtttttgccacgaacgcacgcaatacactccaatatgtccaaaaaacatgttttggcgtttttgaactttttgattccggtcaaaaacatcgcaccctcgtgtgccaatgttgccattaaggacacggatacagatggatgaagtcgttgcgacgatggatatctctgaggcaaatgaaggctaaacgagctgcggctcggtaatcgagatatctaggcaaatgaagactacacgggtcggtgcccgttagtcgagatgccatggcactggactagtacgcgggtggtctcacccttatgcgtgtggcgcacccggtctagatcctgttgctcggggctcaatcctggcctgcctgtcccgagataccggccgtaggcagggttgggtcggtacttttgttcacggctaggatgggtgaagggttatgtcacatgtttacgacgggttccaaggccatggaatgggatgtcaaaagaagcaccatctattgactcggctgacaaggagattcagccggaaaagactgtgccgtaggagtactgcgacacacggttgctgctgtttccccaacgaaaggacgagcagttcgctcgttttgtgatccagaagatccacatcaaagtgccgttgttggatgctatgca

SEQ ID NO: 52059 - DNA, 548 bp, Oryza sativa
cttatatttaacctttgagagagtatttaccaagaacccatatagcagagatataaaacagagcaactattcatcatttcaataaagagaactagcttgtcttacctagcatgactcaaacctatcctatctttttggtattttctatttttcaaatttttatgttgttttcaagttttataagatgcaattagaaagcaaatatgcaattagaaagagaaatatgcaatgtgatacaagttaccttagtagggggagcgatgtctccccccaagtttggctttcgctcagggtccttgataaggattgaatccctgaaaacggaagtatgcttgaaggtcatcgtgctgttgctgcatcatgttgttgatgttggcgaactgagcatcagcagattgttgccattcttgcgtctgagctatgtgttccgtgaggttgtactggatctcccccgtctgcatatcaagggtgtccattctcctagtgatttcacccaagtcccaacgagaggaactcgagccccattcacttggagatggaggcacacc

SEQ ID NO: 52060 - DNA, 1048 bp, Oryza sativa
cttaacaactaaaatatggaatggttggcctgggttggcttgggatgagctgggacctgggtctggttgccagttcggtctgaatcatcgtaggccttgggttaaggcaggttcgtatgggttcacggccttgaataataacattgtgtagctctagaatcgtatttataaaatagctttgggcaactaagtgacttttaaatgctgtttactgtaaaacttaacccctattattatccccttgtacccccttgcattaatcatgcatctgccggtgtggcttgctgagtactgtggttgtactcattcttgctctatcttccccccctttagtaagagaagctttggagaagaagtcttaggtgaagtcctggcttataccccagttgagcacctgtgaagatggagacgtaggcccgctagtccgctgctgtttatttttgtttgtcaggcctgaagtgcctttttaataatgtaaatattatcgatataataaagatgtgtcttttatatcatgtttgtgtggtgtaccccggcttttcctgggacggggattaatacactagcgttctggaaaggtattttccgggcgcgacaatatgattgtgatgcatgaatgtaatttatttccaaattatatgtacataatcaaacccactaatttcgatgtaattgctttatttccgtccatactaattaatactttctatgtcttgggtgtatatatatacctgcagcgatggcattctattttttacacactccagtttcatatctctatgccgttacaccgctggacgtcgaccgtatactcgagtcgctaccggcctatcgtataccgagccgttaccgcaaactgagttaagtctactggtcgtgccacagctgtacactagccataaatcgttcgttcgcacgaagtatagtccaaaggctagttcgttcggtcgtcccgagttgctcattattaatagagtcattttaagccaccgattttgttcgccggttcggttgaacgtttgagtggtctcgtatcacggtgggttga

SEQ ID NO: 52061 - DNA, 790 bp, Oryza sativa
atagagggaggatggggtataggatagtgagacgaagaggaagaagggtcacggcaacgagaatacacataggcatgtgtgttttccatggtagtcatacgccggtccaaagaagtgacttgagaggatatcctggcaacctcagaacgaatgcccctcgcatcctcatgcattgcttcagccctcatgctcggtagttagcctttgaatgctttcacttaagctatttatagccccaagcaccgagttgaaatagtcctgaagaggcatgccaaagtatgcataaggaggagtgaagtactcattgataccttgaggaggaggaggtgctgagcttgagattgccccaaggtggaaagaaggtgcctcatcctaggagtatggggagtgccaagctgaagaccaggcttatattgcttatgcttctttagattgtttccaacactcccaagctgagcttgaatctacctcataatgtagggcgcatggtaaattcattgactaaacgtgcccttggatattgcaatctcttgcattatgaagttccccacatcaaactgacgaccctgcatgatggcatttatcacatgccaagccacccccttaatatcatcattattcccacatcgagggagaatggtggctctcacaattctgttcaccacactaagaatagtcatcaaccctgcaacttttccatgggtggtgtcgccttccatcttcatagacctgtgaaagataatcaatggagagcgggttgtgagtatgctccttatgcagatcatcacca

SEQ ID NO: 52062 - DNA, 555 bp, Oryza sativa
caatgtacatgtatatactttgcacgttaattcaaggttgataacgcaacacaccttcggttaataaaggaccgatcacctttaagccagtaatttagcaagttcatctactcttaaggtaccctgtggaacaacatctgatagaaattctcgtgcgtgatcatttctctgcattcttgatcctcccatgacaatttctttctttttgacatgatcagatactttatgttcttcaagatgcttatttatccttacattcttggctggctcagtcttctgggtaccatgggacttccttggtgtatgccggagtaccaggtatcgtggagccgtctttgtaaaagcaacagacttttgatacacataattggcatcagcaaactcattttcattcagcacgagtgccatgccactgtcaatggcttgtttgaaaaggagtaaaattccttccatgtaggaagggactatggaatcactgttaacaccatcgctgccgtttaaatgtttgcagtttctcctcatagtttccaattcatgaatctcatcactgctgcc

SEQ ID NO: 52063 - DNA, 729 bp, Oryza sativa
gaccgcacatgtcaaacctaagggaccacggcagaccgggtacacagagacggtccacgggtcgacggaagcggaccccgtgtgtcaaccgagacgggtggccgacaaacggactccactagacaccatgcgggctgcacacgtggaaaccacgcggctaccgagcgggcacacaaacacggtcaccacacgcacacacgaacgactaccgacaccggtacacgggtaccggggtagacagccgcacaacgggcacggggcgacaccgaaaggacgaggacggaagcagtgaaggagagatccttaccaccacacgacgaggcgtgggtacgacgacgaagaacgggcgcggcggagacgactcagggacgacggaggcgaacggcgagggaacgacttcggcggcgatccttggacgaaggcgagacacggccgacacaaggcttgacgacgcggagccaaggacgaagacgatgacggggctgcagcagcacactagacgaaacgcgggcgacgaacgcgatcggcttgacggagggacgaatgccacgacgatgaggacgacgaccgggaccggcgatgaggcgacgagggcagccgacagtagctgcacggagacgaagacggcgtggaacacgccgctgcgatgccgacgatggtggtgcagcggggtgatgagccggcgaagaggagcggccgaccaagggacgtcggcgacgaggaggatgg

SEQ ID NO: 52064 - DNA, 609 bp, Oryza sativa
tcggtcggttttggggttgcatcaagggtttgttgtttacccagccttagtgcttgtgctgtggttctgttttggcccttgaggaagaagaaggggaaaggaatatagaagatctgtttggattcggttgggtggaaggaaagaaaaaaaaaggaaagaacagaataggaaagaaaaagaagattagatcgggtggaaatccgtttccttttattttgtgcactgaatccaaacactagtgctggccgcaatattcagctccacctctctgtggtgccttccttcctccgagtccgactcctccctctcttctatcgatttagatccataccgtgtcttcccgcatagcttggtgaaaattttcagagtgtccgattggagatccgtttggaaaaacggaaccaatataaattcagcattccatttttgtataattttaatttttgggtttgcacttttgcatttgaatccctgtaatttgtatatttacagttgagtccttgtaatcttgcattaaggtccttgagttggtttttgctgaaaaaaattttaaaaaaaagaaaaaaaggccggaaaggtgttaaaaagaaagaaaacaaaagcggcacc

SEQ ID NO: 52065 - DNA, 740 bp, Oryza sativa
tgaacgcacccaatacactccaatatgtccagaaatcatgttttagcgctttttgaacattttcattccggtcaaaaacatcgcccctatttgggccaaaatgtgccaatattggcattaattgataaaagttcgccgtgtaaatcatgaattcagtttttgccattaacgcacccaatacactccaatatgtccaaaaatcatgttttggcgttttttgagcttttttattccggtgaaaaacatcgcacccccgtgtgccaatgttgccattaattgacaaaagttcgccgcgcgaatcacgaagtgagtttttgccacgaacgcacgcaacatactccaatatgtccaaaaatcatgttttggcattttttgaactttttgattccggtcaaaaacatcgcaccctcgtgtgccaatattcgcattaattgagaaaagttcgccgtgcgaatcatgaagtgagtttttgccacgaacgcacgcaatacactccaaaatgtccaaaaatggcgtttttgaactttttgattccggtcaaaaacatcgcaccctcgtgtgccaatgttgccattaattgacaaaagttcgccgcgcaaatcacgaagtgagtttttgccacgaacgcacgcaacacactccaatatatccaaaaatcttgttttgccgtttttttgaacattttgattctggtcaaaaacatcgcacccccgtgtgccaacattggcattaattgacaa

SEQ ID NO: 52066 - DNA, 512 bp, Oryza sativa
ctaaaaatttatatattacttgtgataatcatattctaagcaggggttaagataatccaagggtagagtgacacacaagcattactactcattctcataatatattatctgagctaagtggaaagaaaagagaaagaaaatctattcctatagttctaatatacatagtatacatacattctagttaactgatatactagctaataccctctatccgatgccctcctggtacttcgagaagccacccctgactatcgagttccttacgacagtctgtcatgaccatacaaccagagctaaataccgaggaatacccttcccaagaaattaacttacgactatataccggcgcaaaggaatacccgtactgagctgtcaccatcagcggcccacctcccatccccaatatataaccccaaataatgatatctcgtaatctagacaccacgtctaaactaccagatactactataatatcatcatcatgacatagagtaattgcataagccaac

SEQ ID NO: 52067 - DNA, 697 bp, Oryza sativa
aaaagtgtaggatttttttactagggcatatggaatcagttggatgtgtgaaagtttgttttcctttgatttttgtaattgatttaggcaaaaggattgattgtgtactgccattactatgttgtttttaggttaagaatggatcctctagagtatttacctgttagatttcactttggtggggatttcattaacaatgggagggaaaccttttatattggtggatctgaggggatgtcctacatcaaacgtgataaggtctctctgcctgagatagttggacatttgaaagatcattgtgaagtgatccctggcatgcttctgcaatggttgtttcctggcaaagaacttgcagatgggctgagggttttgattgatgatgaggtctacaattatatgtcaaactgtgttggggaaggtggtgttgctgatatttatgtggagacagtaatggcagaggggtccagtgagtctggcagcaaggaggatagtgactttgaagatgaactgcaggacatatctcctgcagatgatgaatgggatgatgaggaagatgaggatttgtttgagttgaatatagggaaggaagttcttgtcatagtgtctacaccagagaagacaaagagagatctggaacaagtgcgagcatttcgtacacctgataaagaaaaagcaatggtagtagctgaacctagtg

SEQ ID NO: 52068 - DNA, 705 bp, Oryza sativa
ccaaaaatcatgttttgcattttttgaactttttgattccggtcaaaaacatcgcaccctcgtgtgccaatattcgcattaattgagaaaagttcgccgtgcgaatcatgaagtgagtttttgccacgaacgcacgcaatacactccaaaatgtccaaaaatggcgtttttgaactttttgattccggtcaaaaacatcgcaccctcgtgtgccaatgttgccattaaggacacggatacagatggatgaagtcgttgcgacgatggatatctctgaggcaaatgaaggctaaacgagctgcggctcggtaatcgagatatctaggcaaatgaagactacacgggtcggtgcccgttagtcgagatgccatggcactggactagtacgcgggtggtctcacccctatgcgtgtggcgcacccggtctagatcctgttgctcggggctcaatcctggcctgcctgtcccgagataccggccgtaggcagggttgggtcggtacttttgttcacggctaggatgggtgaagggttatgtcacatgtttacgacgggttccaaggccatggaatgggatgtcaaaagaagcaccatctattgactcggctgacaaggagattcagccggaaaagactgtgccgtaggagtactgcgacacacggttgctgctgtttccccaacgaaaggacgagcagttcgctcgttt

SEQ ID NO: 52069 - DNA, 2656 bp, Oryza sativa
ccactgtaaatgtgctacagaggatgtacaatgatttgaggtgatgcaatacttattgtcactttttttataatgctctattttttttctatttggttaccatgcaaaggatatataggtgtgtgtgcttaaatggagtattttcatttttatggagtgaaatatgagtaatatgcatcttcaattatttatttaattataaaaaaaataacagttcaaataaactaaaaaacagttatgacataagaatcataattatttagctttgtaattattgatcattttttattattttgttaattagttaaaaattataagatagaggagttgagtgagataggagaagaagagaaagtcgaatgggacaaagtatgtgtacatataattatttttttacatttattgtgttttacttattattactttattaactaaaaataaaataaaagctttattgattgattaagatctatcttttttactcgtcttttcctacatagtatacaatattgaaaatgtgaacattacaaatctactactgttatttttgctttattataatatcataatgggaggagtaaatttttggaacaatacttagtgttattaggttcattttacctttttgtcattacatatctaattgaattattgtgaacttatatacaatgataaaatatatatcattactattcacaattttataattgtttgaatggcacataaaagtcagataatataaccccaaatatgggtctttaaatgtaaaataatcaaaatacataagcaaaaatattactcgtatgatataggggatctcatgattgagatgttatagctgcttatttttttcgtataactcttgctttctaacttatatattttgggaacattactcatagctatttttttagattttatgattgtagatataatttaattcttatgaagttatgcacaatgatagagtctataataatattatttcatatttattgtaattgcttgaacggtacgcaaaagtctggaaatataatccaaagtgtcatttttttcctcaaagttgaattattgtggaattttggtctttgcctgtagatgcagtcataaataattttaagatataagcggattaaaagttagttgtatgatttagatgttatagttgttgaattgtttaacacaaaaaatatattttctaactaataaagtatatgataataggggaagaaatatgtgcaaaaatatgaagaaattgagggatgaaggggtggatgtacgttactaacgtacgcacgtactatccttaagaatccttaagaaaacgtacgctacatacagtcccaatttggatccggtttgggggttagggagttcttttaaagacaaatctaatggtggtaaataatgggtccacataatttaatgaaaattaatgtctagatgtttggttttttcttaaaatttttagaaatttctctaatttattacagtgacacgtggtgtcttagtaagtagcgcttgcaggatgccacatggtggcttagaaaagtttgttatataatagatctaacttaatttgttcatgcatattctgtgaattgatatatgattgtgtaatctacattatcaatttttccctattttatatgacagttttccgtgttatgcaaagtttaggaggtgataaaaaattaaatatttcatataggttaaagaacaccatatattttttaattgttgatagactacgtgcaaataactatagaaaaaatatggttatttaagatttattattgtttaaaaatttgtataactaaagaaaaaagaagaagagattggataggaggggagggaagacgtacctacggacgtacgaacttgagttgtacgtccagttgaaggatgggcccatggggagaggagagggtaggggagtttgtggggttatttttttaataaaattctaatagacaaaaatattggacctaccggtttgttaagatgccatatagcggtttaggagtatttgtaggagtacacatggtggcttaggagcgtttgtaggaagtttcttggacttttagtatataatagatagatagataatagatgtggggaatgatagaatgacttacattgtgaatcggagtgagtagaaggtacactagcacaaaagaagtgagcttgttcttgaaatgtcactttcactaaaaaaatagttggagagagaggagaggccccctatcacacccgagcaactaacctgggggcgacatgcaagccctaccgccaccaccctcctccccattcccaaccgtacgcagccggagctagccgccggaaattgagcggctagctaggattgcgatggtggggctcggtttttgtgcccctccggcatggagagagtgttgccggacgacggcggcagtacgagggaggtgcgtgcggcgaactcgctgaccgagcttattagcgagtgtgttggggggcatattgcggagcagctttcgacccaggtttggtggccattccccgtcgctcttcttagatctggggcttcctcaccttgtcggtggtcggtgcgagggacctgcctttctctagctatcctcctaggccgtgcacggtgtgtaagttggtggggatggtg

SEQ ID NO: 52070 - DNA, 2283 bp, Oryza sativa
gggtggggggtgctgcacgaatcttaaaatttgtgcgatgtgaagaggggaaataagcgatgtatagatagtatcataaatctaaaccagggacagttaactatttcccactgttcacttaattattacatctgcaaccatggaaccattgaaagaaatgtagccattatatatatcaaagctatatttggtagcttcttccttcgttacttttccctggatggcagaataggcaagcacacccagtgttaatacaggtcccatgcctgcgaaaaattctgtagcaatccacctcacacgtctgcggatcacacgccgtacccggagatatgaccaccgttgtgcagttctgcgcttggtccgctgccaacttgcttgccggcacttctgtggccaaaaaatgcaacaaatttatgtgaaaaagtactcttgaaggatatgcttgttcagcaaatcagtgttggagttgggtgcaaattaaagttacctgaactcatcgccaggatggcaagggccataagcatcagatgcccaatcctcatgaaactctgttggtcgcaccgttgagaatgggagatgttgcgcaaggtgacctgggtcccttggcttgtggatagttcatatatagtgaaatggcaaggctttggtttaatttgctctggaagttgatatttttttcttttcgggatcagttttggaatatatgatgatctttaatgtgcataattaatatggatatattcttgtatctagaaacaacagatacagttaataaataggtcatgggccactacaaattggagatatgcacatccagcttggcatttatagcatatattcatcagtgcagtcatggggccaggccactaattgtttgttggggcattttctacttcaaggttataatgaaacagcctcaaagatttaaggggctttttcgaccttttcattttcaaatcccaactaaaacagctttcattccccctggaagagctcgtaggaacaaattgtatccttatcacctaattgtaggaaaggttaatcatgaatgaattttaacatgtttcatcttacatatatcaattgctttgctccatatctttctctgtaaatattaacatcttgcattatatcaaaatatgaacatattgcacaattacttgaggaaaggtttgcaaacataagaacaagaagaggtagagatgaagacaaaaaggtctttattggtatatgggaattttgtgctattattgttgtttgctacacatcccttggaaaagctgaccatatttgtcaccttgtgatgacacatgaagcacttgctacgatgaaaaagctcttgcataccaaaaccaccttgcacagaaaaaaatggaatgtccaatatagaaatccttaccaacaatcgtttgaaaattggaaattgttatagggaaataacttgaatatatcttgagaaaatatatttaaagatcattgattcaatccaacaatgctaatatattaattgaaaatgttagcacacgaagacatatgtttcatgggaaccaaaagcgtaaatatgcttaagtggaatatatttttcataaatgactagtttaaaacattttgatgaccacggacccaaacatgagcaattcaacatttaaataatttttttggggggaatattagcaattccagccgggcttggtctggaggacacgacaacagtagtgatggaggcggctgtgctgcacacggagcaacgatggatgtggcggtggagggctagccctctagcttgggcttctgtggtgccgccaaccggccagacatatgccaccgtcactgtcatttgtcgctcaagcacagatatcggtgacgctagtaggcaccacacaccatcatggaggtgatatgtgaaatatcgatagtgacattcccaatgtcgtagcctgctacaaggcgtctcattagaggttccctattggtgcggcatccttatggcgatgtctgtgttggttgggtttgatggcaatggtggcatttggatgaatgactgatttatataactcaattactctccgagttatcttccgctttgaacgtcagtcacctatagttatgggaccgaaatttgatcggcaggagtcggccgctgatttctgggtttttgcttttctggttttaggaaaataaggactacatacatacatctgattaagttgtcgatagaaataatggttatgcatgaacaactatatatagaaatcttgatctctttaaggtggtaaactaagt

SEQ ID NO: 52071 - DNA, 1753 bp, Oryza sativa
ccccccccccccccactgagcaaaatatcggccggcacgattttcaattttccgggggcaaaaaaggaaaaaaaatagtactcactaccccccccccccccttaatgagcgaattatcggcctgcacgattttcaaatttcagcacactaaatttcaaattgatttcaaatttgggcctaccccctaagaaatcctggatccgcgcttgcataggcctacttgaaccaagtttggttacaatttgcctcaatgtcttttacgttatcgccgtaaacaaaacgttgaattttgacctcgttacattttaacctttaacatttcaattcgtttttgtttcttcttattacacttaagccaggttattccttcaatggttttcaagttagtgcagaaattaaattcattctggtatttctaaacactttcatggccctgtaaccttatgacctgtagccacgaaatacatgaaacctgatgaattcattctaatatgcgcatgtatatagttcatccaagtttggtttgaattgcttttaatgtttcttaaagtaaacgcggtaacgagatattttctgatgtttttaacacttttattgaacctgtaatctttgacctcttacaccaaagtatattcagttcttcgttccaatggataattctttatcatttagccattatttgtttgttggcatgtacattatgggagaaatgtaatcttaatgttaatatctacaaaatgtattaacgatttcatgtaaataaaacccaaatatcttaacttcctagcttggtatgaacatctcttaattggaaccgatatattatattttgatcgcccaatccgtctgtccgtttgtccggacgtccatcccgccttttggtatcgcggaccggctccggacagacacggccgcgttcggcaccaccctcggtggcggatgcattatgaaaagttgtaatacgttgaacgtttaatggtattaagagatgttgcaatacgaattatatgatatatttatgaccaaaaaaaacagtaatttatctatctaaagaaatgtagtatgtacatacaaagctaggaagtcaagatatttgggttttatttaccggtacatgacatcttaaatacatgatatggatattaacaagagatgtagattacatgccaacaaacaagtaatggccgaattataaagaattaacaaaatatattcgatgtcacaatttaaaagggaggtaaaacgatagcaatggtaaatcattgcatttattcatattagatggttcttacagatacacagttgcgattgggtcaatcctcgtaacgtgagcttcctggctctcaaaatttcgtctcgtttggttgattgccgttttctttcgattcaacttccgctcggcccctcccccaccccctccccctccccccccctctctctctctcttcctttctcttcctctctttctctcccttaattttcatcttttaatgccattttttctttcaccagtacattcctaagaatacaaaacattgcctgaaaacaaaaaatgttgcatgatcgaagacataacagtttctcatatacattttcttatatcgtcatccgatccacttacgatgttaattctcgtcttttgatttatatatttaggactgacacacagagtgaatgataagaatagggcccaggtgttcgatgtgaaggaagtgattacgcacccggactacttcaaggaccccgtcgacgg

SEQ ID NO: 52072 - DNA, 8467 bp, Oryza sativa
gggggggtacgcacctggtgttatcccatgtactcattcctgtttgtagtgcatttgattttttgtcaaggtagagtcagtttattttcattttgacccttccaagaccacacagtatacacaaagttttaggtaaacctaaatatggtggtgaatcatctgtttattatctgattttgtctttttacactatttactctcaagtatcctttttttgtctcatcagataatgctagtcagagtgttgtgccttcaacatctacgtccactccggaaacacaggaggaaggagagccaggtgaagaagatgaagtagcgataggtgaagaagaagaagaagatgatgaagaagatgaggaagagttagatgaagaaggaatagacgatgaaggggaggagatggaagagcaggatgtcttggatgttggacaaggtgtgatggagaatgagaaagggacggagaaagatgacaaagatggtggggaggagagtgatagcgagaacgaaatggccatggaaatgttggaattcatggacagtagtatgatgcccagctgataaagactggtggtaaaccggaaataataaggaaattattttcttagttatggttagagttcataaacatttcttagaggtgtcgtggacgagtggatatgtcaccggactgtggatcacaaggttcgcggttcaagtcccactgcggcactaatgtcctttggcaagacattgatctacatttgccactctccacccaggtgttaaaatgggtacccggtaggatgcgaaagctaatgtgcttacattagcaagtgtgtgcttgtaaaaatgacgcctggctggaatgctgcccaagggatggagaatgtgcatacattttgtgtgggtaagcctgaatccaatgaccggggtaataatatgattgtagggccctcagggagaacagtatgaatactgatgaggctactcaaacaagacataatattattattattattattataatggatgaagatgatttagcgatgtgggaaggagagtaacactgagaaaaatggcagaggtgtcaaagtcgagtggtctaatcacttgactgggaatgcaaaggttgtgggttcaatgctcgtaacagcttccatttccttgagcaaggtattttatctacattgctcttctccagtgggtacccggtaggatgcaaacattaatgtggttggattagcacgtgcgcacccgttaaggaggtgactgactggtatgctcctcaaggagtggagagtgtgcagaatccatccgttgtaactggtgaaacgctttataagaaatctttgttattattaaaggccatcaaaatataagaactcatggacagcagtatgatgtacatgtagggctgataaactcttacatggtagaccaggggggtgtttttatgcctccgttacgaagtagccggaggcattatgtttttgggttgtccgtccgtccgtacgtacgtcccgttctcgtgatcgtgttatctgaagaactggttgatggattcctgccaaactttggtcatgtatgtatcttgtagagccgatgaactgattagattttggggttacgaggtcaaaggtcaaaggtcacagggctcattatgtatgcaaaacgagctcgtgatcgcgttatctgaagaactggttgatggattcctgccaaactttggtcatgtatgtatcttgtaaagccgatgaactgattagattttggggtcatgaggtcaaaggtcaaaggccacagggctcattatgtatgcaaaacgagcttgtgatcgcgttatctgaagacccgattgatggattgctgccaacttaggtcatgtatgtttcttacagagccaatgaactgagtagattcttggttcataaggtcaaaggtcatgagctcattatgtatgcaaaaatagcttgtaatcacaatattctgagaacctgttaatggattacaattgaacttgaattcgaaaaatttcttctgttttggtttgtaaaattgctctatgacggaggcatcattttcgactgcgcgcagtcgaagttccatctagtttttttttttttacttttcataaattccacatcaagaaaatgaaatctccttgataatagaaaatatgaatgatttaaatcaacattttatgccttttaaaataacttttcaaaatattttcaaagatgctcacggctttccataattgttaaatccaacttagagataagttcaacttagtatcttttttaaacacccccccccccccttcagaaataatgaggtagatgtgttttcttggagatgttcatgaacaaggttatgatggataaaggtcatataaacatgggggagtgacagaatgaaatggccatttaaatgttagaattcacgaggtggtaccatgctgagttgatcaacacattgtgtgtaattgggtttttacagacatgaatcaatcagacaagattgtttacgtccggggactgacctttaacatcaccatccgaaagaggtgactcggtttcgaaccggggtccatctgagccagtttgtaggcgaagagacagagagctgaccaagtgaatgtactgctagaccaactcacatctctctgataaacacagatagtagaccaggggtgtgtttcacatagactagtatcgattataagttggacttaaatatggtaggctattcatgccactagttgttctcaccattggtctctcaagggatgtcacaattctacagaatttaaattttttgatagttcattgttgaagaaaaaacgttacttacctttgtaaatgtgcattatatttaagactttttttcttcaacaatggtgagagcaaacagtggcataaacagcctgccattgtcaagtccaactcaaagtcgatcttagtctttgtgaaacactcccaaaaatttatgaggaagatgtttagagttcttgaacagtgaggggtggagacggatgatttagatatcagggagaggagagtgacaacgacagccatggatatatcggtattcattgacatagtgcgatgtcaatccaatagtcaagaacaagtgaagaataataaattgctcgagtgatatgagcaatttctaccatgctcagttgataaagagagatgaaagacaaggggggggggggtgtttcacaaagatcctaagtcgaacttatctctaagttggacttaacaattacggaaagccgttagcatctatgaattttttttgtaaaagttattttagaaggcataaaatgttgattcaaatcattcaatgatttctattatcaaggagattttatgttcttcatgtgaaatttataaaaagtctaaaatacttgaattttcactattgaacatattatattttaaggctactaatggctccccataatttttatgcctccgccaccgaaggtggtgccggaggcatcatgttttcgggttgtccgtccgtacgtccgtcccgtttgaccgttatcacaatatctcaagaacaatttaagatttaaacttaagactcgggaatagtatttatcaccataggaagacgatctgattagattttggagtacgtaggtcaaaggtcacaggtcacagaggtcaacttatgaaattccttgtattgagtttgttagcgcgatatctcaagaaccatttgagatttaaacttcaaacttaaggatagtatgtatcaccataggaagacgatctgattagattttggagcacgtatgtcaaaggtcaagggtcacagaggtcaacttatgaaattccatacattgagattgttatcatgatatctcaagaaccactggagatttaaacttcaaacttagtgatagtgtgtatcactataggaaaacaatctgattacattttggagcacgtaggtcaaaggtcaagggtcacagaggtcaacttatgaaattccatacataagacaatctgattagattttggagcacgtaggtcaaaggtcaagggtcacagaggtcaacttatgaaattccatacataagacaatctgattagattttggagcacgtaggtcaaaggtcaagggtcacagaggtcaacttatgaaattccatacattgagatcgttatcgcgatatctcaagaaccactggagaatgttcacttcaaacttaatgaaagtatgtatcaccatatcataatatctcaagaaccactggagatttaaacttcaaacttaatgatagtgtgtatcaccacaggaagacaatctgattagattttggagcacgtaggtcaaaggtcaagggtcacagaggtcaacttatgaaattccatacattgagattgttatcatgatatctcaagaaccactggagatttaaactccaaacttgtttaaattgctctatggcggaggcatcattttcgactgcgcgcagtcaaaattccatctagtttaagtccaacttaaagttaacttcaacttcagatctttgtgaaacacccccagaactaggagtgaggaacaggtattttcagggagatatttggatttctgggactgtgttatgatgcccaactgaagaaagatgacttttaaatgtaacttaaaggtaatgtaatttaaaggtaaccccaccccaagaaataccttaagtttttctgagagatttgttgtattcttgcccatgaatcttcaagattccccgccaaagggtatgagagaggtaaaacaagattaatgtatttttttctgcggcaaagattggggtaaggtgcttgttgagcctatgggaaagtttagcgttagggttaaatcaagacctcttttttttttaaagcccaatctgtgccgcagaaaaaaatgatgcctctcgcgcaatcaaaacccctcaaaataaggactttcgcattccgctatggggaacatggaaactaatgaatctgattgactgcagtatttaatattagtcatttcgtttttcaattagtctccattgtaagctaccaaacatgttgatgaaatatgagtcatgctaaaagggaacgaagaatgctcgtgcctcgtgtgacatggaatgatgataatgtgcagattacattagcgaggcattatggtcatcctaacaatattttaataattcccactgtagcggggcaaaacttgtatagcgccatatgtggcgttcagaaagtttgtgcaacagaaagcctagtcaaaggcatcagacttgatgtttgttaccacagaattcatgactttgctccggatgaacaaatagttggtaagctacgatacatgattcctgtagataactgatttactgtcaaatataggaatctagttgtttcagacgaatgtttatttcctgtgaattatgtgcaaatggtgagttgattttggatgattaacgcaacgttatgtacagaaggctatgtgttgctatgtgttgctaaggggctatgaaacgcattgcattagcagggttacattacaatgtgtgtgctattaagcagagggggttggaccaattagtgaacagagtgcatatgatcggacagttatggttaatgattcagtatgctacatgaagcatttatatggtttataatacatatatacattgtacgattgataagatagaatgccaagggtataatggcagtcgatatgttaattcatgtaaactaggtcggataagggaccgtgttgttgtgttgaattatccatgattcattggataaagtgcaagatgcacagtgggataatcatttagttcagtttatatttaccaattgggttacagtataagtgataacctgtgataagttttgcatgtaccagtatgggtatatagtaatggatcagtttaatttgtttactacattaatgtattgtagtgctggaaggggggcccaggccttttgtaatttaaacgttatcatttaaagagcgtttatgatgctatttgttgaaagaattcattaataagcaaccaggatgtaatagccttgatgtatgtgattcaaaatggataaggttcagtttcagaatagtaggtatacatgattcaagttatgctagtagaagaaacagaaataattactctgatataaacaggttaatgcatccatttgagtttactacagacatgctccaagcagattacaatagatgacatatattgttgttcattgctttaaacatacaattagtctttgttctaactagagcatattatttatgcaaatatttgttatcttttctcttagtgaaccgcgttacaaattctattcagataatataatgagtattaaaaagtattaaaattggagtcttggcagtgtgctaatcacaagtgtgacatgggtacgttacatgtataaacatattgcacatgataaaatggaagtccttgggtattattggtcacagtaagaatagccgataattaaagataaagaccagttatggtcatgcgattgcattaattgtcaaagaaacgttgtggaatcgatcagaaaaggatgatcatctagcatataagtagtggtgtgtactgcaaggttctggaatcatcaaaatgataagaaatgtggcccagtcttcgtaaagttacaaacactgtacacagaaagatgtatatgggacaacgcacatgtgcgtttatctctcacaaaccaatagataaactgatttaccaaatatatcaattagtaggcggttttcccggcaaaattgttatcatcatgtattagcagtggcgtaatgagcaaaaacgtttgggggggggggctgacaaaaaaaatccgcatcaccccactctaacatgcaggccccgctgaacgtttttcaaagtggggtataggggcaaagccccatcagggggtcagggggcggagcccccgaagctcaatgggtatgggcatcagtggtggatccaggagttacttacggggggggggggtggcatggggtgaaatacatgtaaaacctgatgaagcgacagagcgaggctttagcggcgagggagcggaacgaccaagcgggggtgggtctgggattagggattaggaagcatttgcaattttaaaaccacattagacgccttttcaggcacttcctggagtaatatgacacaaaattgctttttgcgcggaagctttgatacttcattaaattattagagaaagattacgatccgttgcaccgttctagactttttattcttgtttcgcccctcccgcgcgaagcgcggaagctatgacgtttcatttatttattagagaaagaagacgattcattgtaccgttctcgactcttaatccttgcctgaattcattttcgcccatcccgcgcttagcgcggaagcttttacgtttcattaaattataagagaaagaggtcgattcgttgtactgttttcgacttacaatccttgtccgaattcagtttcctccctccggcgcaaagcgcgagagctttgacgtttaattaaattattagagaatgaagacgatttgttgtactgatttctactcttaatccttgctttcacatttcattaaattatttggaaaagaagacgatgcgtttccttaaatgtttactcttaatccttgtctgaatagagttttccccctcccgcgcatagcgcggaagctttgaagtgtcattaaattattagggaaagaagacgattcgttgtactgttttcgacacttaatccttgtctgaattcagttttcgccctcccgcgccaagcgcgagagctttgacgtttaattaaattattagagaaagaagacgattcgttgtactgatttctactcgctttgtctgaattcagtttccctccctcccgcgcgatgcgcggaagctttgacgtttcattaaattatcagagaaattgtctgaattaattttttcttttctttgtccgataaaaagtcacagttcgtagggagaaaaaaaattgccggccgaccgacaatatacatctcaccgacttcaaacttttaaatgtatatagtacacgagctagatagagcaagaataccgacacagcggacccgacacagcaacataatttatctatgcgtatctttcttgctccttcgacgtggcgactccacccaacattccctttgctctcttactcccacctctcttctcttaggctctttataccaccctctctctatctctctctctcctctctttcgtttctttttcttttgttttgtttgttttcttatgtttccttttctcctttttttttctttctcctttttttttctttctccttttctttcttttctttcttttcctttctttcctctccttcctctttttttctccttctttcttttcttctctttctttacttggttatggttcaatttttttttttttggggggggggggg

SEQ ID NO: 52073 - DNA, 1977 bp, Oryza sativa
cccccccctcaccagtacgccagtgtgtattagtcaaaacatattctttcacataattggtaattaagtgcttccatttcattttttgaaattggggcgtttccaaacactggtctttacctttaaagaatgttgtactgtaaaacgtcatcagaagagaaagaggtggagaggaggagggagagacagaaagtgagagagagaaacggagagggggaaggagagacgaagggagaaggaggaagaggcagaaagagacatattctgagagagagaggggagggagtgaaatagaaatagagaggaaagactgaagaagagaaaaggaaatttgaaaagtagccagttcaaatagagaaaagggatgagagagtgagaggaaggataaaagtacatgcaatataaaaatacgaatgaatggcagaacctgctgtgccaatcatcatgacagttaatataggttttcccgcccaacttcgtcaacttagcatccgaattaacgttacgttcattcaacttcgtgcgaaattgaatgataatgtagatcaacattcaaaaagctaattgcgtcattcaatttgatttagtaccatgggattgcatactcttgtcacggagacgtgcaaaacgagcatttaatttagaaaagcgtgcaaagagcattcaaattcgcgccggacagacagtggtatgtcttcgtgcattcaattccgtgattaggcatacatatgtgacatttgtgcattgcttttcatttgatgttaatttgtcacttaatatacttctgtttgaataattttattcaaaatttacttggaggaatggcatgcgtattcgttacattacacaggtaactgtccccagagaaggtgcacaatttgtgacttctcttctaagcacatgctatatataaacagatcttggacagaggtatagttcaggtttaatagacatgatggaaacaaaataaaatgattgtgactgtctgtgaggcgaaacgctgaataattacaacgactcaggtttttacgggaatgtcagtttattttagagtcataaccatccagggaaatgcaactctgtctttgacgaacgaatctttatctttactcctttcactgctttattccgttcttcttcccttcattccgtgaaaactgtacatgataaagcataacaggaatgcataattagtatgtgttcatgaatataagttccacaatattaaagcagatatagcattctactaaatcaaagacattgtctgaattataactccttttcatgtttgcttgtaaatcttatataagtcagacactgtcttgacaaatctatctgaactttatgtagaatgtcacagctaacacacaattaaacttatatcatctctatcatgtctaaaccagatttaacacggtttcaactaaaaatgtgaccatatttaacgagcttgaatgactttatcatagtcaaggaatacaataacaaagtcatgaccttgacctgtcattcacacaagtatgctcacattcctcatcccttttcatcatagaatgtcttattctgcatcatacattttacttgactacccataggaaagaaatgagcctgccgcatactcctgcggcagacctgccgcagacagtcatctttttcacatgcaaattagttttgccgcagacttgccgcagacttgccgcatactctttcagtatgatgaagagtctgcggcagacctgccgcagacttgctgcagacctgccgcatactctttcagtatgatgaagagtctgcggcaggtctgccgcaggcttgccgcatactctttcagtatgatgaagagtctgcggcagacctgccgcagacttgctgcagacctgccgcagacttgctgcagacctgccgcatactctttcagtatgatgaacagtctgcggcaggtctgccgcagacttgccgcatactctttcagtatga

SEQ ID NO: 52074 - DNA, 702 bp, Oryza sativa
ggaatggtactctgacgtcatgccacaatgaaggttattataccgatgttgttgtgggtgtaaaaaacacggacggtttgctgatgtgttgttgttgaggatctagcttttttttaaaatccactcctcgtaaaatttacacaattttctcattttatgcacgccatagacatctacattcattcaaagagacttgtggagaacctctcaaatcaattcattgctttatatgggatcaaatattccagtttagggggcaacgaggggtcttagaaaataattgaaccattggtaagtgtgctggcgagcgacaagaagtcagcggcaatgttacacaatcgtgcaaaaggtagaaatatctaatttgtggtgtaaaaaatgtgaatgaagtgaaaactatttcgtttacatgttagctgggctaaacattattctcatttctaggtttgggctgattaagtggtaatagatcttaggtgttctcataaaacaacacggcgtggttataagtcgcatcttcaggacagtgaagtcacaggacgggccaagacgaaaaaagttctcatcgactaattgtcattagtaaacgtttgaatgcgcacacacgcacacgcacacgcacacacatacacgcatactcgcacacatccactagcacaccggcgcatccgtcaacatggctgtaaatatacatgtataaat

SEQ ID NO: 52075 - DNA, 604 bp, Oryza sativa
cttcttaattgttcattcaacaaattaatacatgcttagtattcaaccaatgtcaaaatccagtggttacagttgtttttgcttagtattcaaccaatgtcaaaatccagtggttacggttgttttcaccaggtaatcaggctacatgttgaggatggattgatgttgggtacaacatttagaactagtgtggtactactactaggcttaaagtgtcactgcaataagatgctagatactgatgaatttgtgatgtacagttgaattaagtattctatcactttttgtatggaggtattgctatgcagtataataaggactaaggacaggacttttctagtgttttgttttcacctcgacccagtttaacttccttcctaaatcaggtaggttttacgctgatcgtaattataagcaggaaggcataatcatcattcaagtgtttaataaagaaatgagaatcatctacaccactcttcttaatatgaggagcttcctatagcaccatctgccgggccaccacctccgatgacatcattccatggtgcaactcaaatgggagtatatggtatcctggaattcaagtcaacggggcagcagcaag

SEQ ID NO: 52076 - DNA, 758 bp, Oryza sativa
  unsure (1)..(758): unsure at all n locations
acaatacaggtacaccacatgtaactccgcgactatgtacaaacacacgcacacacacgcgcacgcacacacaccaacgcacacgcgcgcacacatacacacacgcactcacccacgcgcacacacacacacaccaacgcacacgcgcgcacacatacacacacgcacgcacacacgcgcacacacacgtccccttcaaaacatacgggacaatagaagaatatgttgtacaaggaatcagttattttataaacctaacaaatatcgtctctgatagagaatgccgcgtcatttatacatgtatatttacagccatgttgacggatgcgccggtgtgctagtggatgtgtgcgagtatgcgtgtatgtgtgtgcgtgtgcgtgtgcgtgtgtgcgcattcaaacgtttactaatgacaattagtcgatgagaacttttttcgtcttggcccgtcctgtgacttcactgtcctgaagatgcgacnnnnnnnnnnnnnnnnnacntnnnnnnnnnnnnnnnnnntttatgagaacacctaagatctattaccacttaatcagcccaaacctagaaatgagaataatgtttagcccagctaacatgtaaacgaaatagttttcacttcattcacattttttacaccacaaattagatatttctaccttttgcacgattgtgtaacattgccgctgacttcttgtcgctcgccagcacacttaccaatggttcaattattttctaagacccctcgttgcccc

SEQ ID NO: 52077 - DNA, 1290 bp, Oryza sativa
aatcgctaaatctattctttagcccgtcgcggcagtggtccagcctgggtttagtcattaaagggggccccaatcgtgtgtatgaaatgcaagaaaacatgcaaaagaaaggtttgggagtgggagttattttcgctctctctgcctatcttttttttttggggggggggtgggggggacattggtctaactgcgtgtgtaaaatacaagagaacgtggcattagagtaaatgtggggtctgggagtggatcatatctttacaagtttcacatacttttctttaattctttctctctttttttgtgtgggtacgtgcccctacccacttgtagcttgaggtgcagcgaggtattctcatcaaatgtgaaagaacaacattttctccttttcgtattttttccctttacttggaacaattccaagaagtagagattggttcttttttttttttttaaccttggtagagagtgggcgattcatgtcgtaactataacgggggtatatagaaacatctccctactcaactatagtgaaatcttcagttttaaaggtaaaggtgagttctggtaaaaaaggagaaaataaattctcacagaatcaaacgaaacttacactgaatgtttaagattacaaataaatgtcaattgccaaacaatttttgtagaaaatgtatactggctgagtaatagcattgaaagattgggaaatcaaggttagtagccccgacaccatttgtgtagtcccatgtacatctttctgtgtacagtatttattactttaccaagactgggccaaatatattatgattttgttgactctataactttgcagtacacaccaatactaacatgctacatgatcaaaaagttccgttcctttccacaccttttcttttacaatgcaatgggggggggggggcggggggggggcttttgccattcatatatgaggcacgtgcccaatgatgtgggggggggacattggtctaagtatgtgtgtaaaatacaagagaacgtgacattacagtaaatgtggggtctgggagtggatcatatctttacaagtttcacatacttttctttaattctttctctctttttttggagggtacgtgcccctacccacttgtagcttgaggtgcagcgaggttatctcaacaaatgtgaaataacaccatttcctccttttcgtatttttctcctttacttggaacaattccaagaagtagagattggttctttgcttttttaaaccttggtagagagtgggcgattcatgtcgtaactata

SEQ ID NO: 52078 - DNA, 2178 bp, Oryza sativa
tactaaataaaatgactttaactagcaaatacaaaattacaactttcacaatgatgaattaaaaaaaagatgttaaatgaaaagaaagaaagatcaccttctcaatcacgattgatcaaaacaaaccatttaaaaaataacccctgaggcatttataatgaaaaatatgaagatatgaatgggagtgggagagatgtttcaacaaaaataaagaacgtcgaaagaaagagaaaacataaaatgaaatatttaaatatatcagacaaataagaagaaacatgaccacattatctcttattcattctacctccaattttcagactgttttcaaaacaatatcatgtgtgtcgatcatagttctatgaagcttgatgtctcatggtaatttaagcaatctaagcaacaatttctgaatttttgcgacaatcgttcgcctttgctgctctttaatactattatgacgtacagtaacaaatttaacagttgattccacttggttgattctattgttcgggttatttctcatggcttacgactttgcgttagtagttgttcatcgtctctacaatgctattttaacaatatttggtgacaaaagacggaatttccatgtagcttcaaaagccatcaaataacaaaaacatggcagataaaaagatcctcagtactgggtctaataatttaaagaacacttaatttgaacccggccatattctctctctctcactcgtttgtcattgccttcattttccctcgcttacttcattcttaccacggaatatgtaatatgtatgtgtaggcctcattatgttaattagggtcaatggtcaaattgtctcaatatatcttccatacatccataatgatcaaggctaaacagtagaaacttgacatatggatagatcataatgggagaagcattttatataacaatatgacatcgtgaaaatgcattcttcattatgtaaatcatgagcgtacgtatcacttaattcgtcaaagtgacgaattaaagtctagttataattattatcatatcattattatcatctgtattgtcagcataatctacaatggcagtagtgtagtatagtacatgtagagttaggccttatagtagaggtatcattctgatcattattattctgattatcttttgcaaaacgtctagacgataaactcatgacaattgacaattgtcatgaatcattgtctttaagtttaccattaaatgcatctggttcgagttttgctcaggtatttggtactggatgatttaaaaggtagaaattaacttgtgacctattcattctagtcttattcatttgcgttatgttttattcattcaagttctaatgtttctgactgttttcaagacatcatacggtagttctatgtagcttgatatctcacggtaattttgagagaaaagcaatgcaagcaatgatttctgaattgtagcgacaattgcgttcgcctttgctgttcttcaataatatttgacaagcagtattaattaatttttcaatgactcatgataaattcgtttaacaattgattaccctctgttgattcttttgttcggatttttttgcggggaaaatagaagtgaatgtattattattcttatttgttcatcgtctctacgatgctctttgaatcaaaaacagcttttagtgttaggcttcctgaaagaaatttcaattgttgttaagaattttttggttgcactctgtagattatgatgatgtgtttgatctttttttcaatacaagatcaaacacatgatgaaaatctactggctgcatgccaataagttcttgacaacaataacaaaacgtgagctagtgctattcggtgtgacgtacacatggcaatcacatggtagatacaattatgatcatcagtactgggtcaaataaattaaagagaactgaatttgaacccgggccataggctatcccctctcgctctctctctctctctctctctatctctgtctaccctactctcatttccccgtccataatgctttctcaattctaatgtgttctttttttcttgtatcttttccatgtcgtatacaacacggacttgtggaccgctacaggctttgcgtcgacacacccaacgtcatggttgttcctccctcggcttcagtgacaaagaaacctacaa

SEQ ID NO: 52079 - DNA, 1518 bp, Oryza sativa
tagccagttcaaatagagaaaagggatgagagagtgagagcccggccccccccccccccccactcagtgttatttagggtacgcatatgctcgttccctctttttgaaagcaccccctatctgaggactgccaacatttccgaacccccctttcgcgggcttttcgcgggcttttcctgccttggagacccccctaaatcatgaaaaatggtcaatgtaccccccttaattcggaataatttcttaggagtgcaaagagatgagagagaaaaagaaaaaaaacaccccctttttaaagaaatctccgggtgaaaagtcaaatacaccccttttttttttacaattctcgggccggactttgtcgcacgaaaagtacccctttaccggacattttggcaacacgcatgcggtcatttcgaaccctgagtggggggggggggggggggggggccgggagtgaaaggaaggataaaagtacatgcaatataaaaatacgaatgaatggcagaacctgctgtgccaatcatcatgacagttaatataggttttcccgcccaacttcgtaaacttagcatccgaattaacgttacgttcattcaacttcgtgcgaaattgaatgattatgtagatcaacattcaaaaagctaattgcgtcattcaatttgatttagtaccatgcgccggacagacagtggtatgtcttcgtgcattcaattccgtgattaggcatacatatgtaacatttgtgcattgcttttcatttgatgttaatttgtcacttaatatacttctgtttgaataattttattcaaaatttacttggaggaatggcatgcgtattcgttacattacacaggtaactgtccccagagaaggtgcacaatttgtgacttctcttctaagcacatgctatatataaacagatcttggacagaggtatagttcaggtttaatagacatgatggaaacaaaataaaatgatgaattaaaaaaaagatgttaaatgaaaagaaagaaagatcaccttctcaatcacgattgatcaaaacaaaccatttaaaaaataacccctgaggcatttataatgaaaaatatgaagatatgaatgggagtgggagagatgtttcaacaaaaataaagaacgtcgaaagaaagagaaaacataaaatgaaatatttaaatatatcagacaaataagaagaaacatgaccacattatctcttattcattctacctccaatttttcagactgttttcaaaacaatatcatgtgtgtcgatcatagttctatgaagcttgatgtctcatggtaatttaagcaatctaagcaacaatttttgaatttttgcgacaatcgttcgcctttgctgctctttaatactattatgacgtgcagtaacaaatttaacagttgattccacttggttgattctattgttcgggttatttagcagaacgagatagaaattgacattctcatggcttacgactttgcgttagtagttgttcatcgtctct

SEQ ID NO: 52080 - DNA, 2067 bp, Oryza sativa
agattctccctcttcccagtacatgtagtaggagtagtattagaagcagtatcacaataataatgacaccaattattattatggttggtggtgttactaatgttatttttgtaattatcaggtgggctgtatatcgtaaagaccaccttataatttcgttattgcctttgtttatttatttatttattatcaggtgggctgtagatcgtacagaccaccttataatttagttagatttgcctttattatcaggtgggctgtatcttatacagaccaccttataattttgttaaaatcgcctttattattctttattgttaggtgggctgtatatcgcacagaccaccttataatttcgttagaattgcctttattatttatttattcatcaggtgggatgtatatcgtacagaccatcatataatttcgttagaattacctttatttatttatcaggtgggctgtatatcgtacagaccaccttataattttgttagaattgcctttatttatttatcaggtgggctgtatctaatacagacctccttataattttgttaaaattgcctttattatcaggtgggctgtatatcgtacagaccacttataatttcgttagaattgcctttattatttattttacttatttcaaaccacttttttgtaagcacgattacttgaaaatggctcaatcaaatgccttcaaatttggcacacatatatgtataggcatttatgtacaaaacacaataacgttttcaactatgaccttcactgatgacgtcatctaggcgccattttgtaaatttttccgaaaatcaactcatgaacatatcttcataaccaaagccatttttgattcatcatatgaaaaactttcgttcatctgctccgcacgcatcgcaccgtgagctacaacacgtgaaattccttaccatttcatgcattacctacgctaaatcacagcaacagcctaactaaacccacttttaataccatctcggcctgaattttaaagttcaatgttttctctttaagatgatataaatttgaaataatttcattcgtggggaaaggttgcactttttgctttaaaatgtttaaaaaaaacctttcacgacactttctctatggaggtcaacggattttcgcccaaaatccgtcaactctccatacttatcttggctgtataactgattcgatcggcgaattgcaccatttcgcatatcaaattgaagcagaggtttcaaagattccagtaatgtatcattcattttgattggataagaggaaaaggttgcacttttgcatccaatgatttgctgtctctcatgtatgctccttttcgcgcaagagcatgacatatgccacactacacgagttccatagacgtacacattagcgtgcgaacttttgcgttgcatgtgatttgaaacagcacgtctcctctcggaatgttcttcgaacttgtccattttgtgtagttatttctttcaatatgtgagttttaaccttaaatatagaaagaagaagacatgtagactgtagtaatgataattaaatggtgatacattatggatttgttgtgtaatttgccagtgaccatgaagaaacacaaaggattttgtaaaattgttcgtcgtaaacctcagaccctgagagaggaatgttccatttgattttggggttagatatataattagtgaactccttgatattgaattatcgatatgaattcaatcttcaacagttttaaagtcttgttattgtttttgtgtcgtcttagagtttcattaaaagacataaacatgcaaatgaaatcgtccttgttttatgttcatgttatgaacaagacccattctccctattttgtcataatggacgcacccagtgatctgtgttacgcgccagtgcacactgcgggacttggtgcgaagctctgtgcagagttgaccgagccggtgagcaatccattttatgaacgaattccgcggatcctctccctatagtgagtcgtattagcggccgcaaatttattagagcaatatagtcctacaatgtcaagct

SEQ ID NO: 52081 - DNA, 579 bp, Oryza sativa
cacctttacctttaaaactgaagatttcactatagttgagtagggagatgtttctatatacccccgttatagttacgacatgaatcgcccactctctaccaaggttaaaaaaaaaaaaaaagaaccaatctctacttcttggaattgttccaagtaaagggaaaaaatacgaaaaggagaaaatgttgttctttcacatttgatgagaatacctcgctgcacctcaagctacaagtgggtaggggcacgtacccacacaaaaaaagagagaaagaattaaagaaaagtatgtgaaacttgtaaagatatgatccactcccagaccccacatttactctaatgccacgttctcttgtattttacacacgcagttagaccaatgtcccccccaccccccccccaaaaaaaaaagataggcagagagagcgaaaataactcccactcccaaacctttcttttgcatgttttcttgcatttcatacacacgattggtgccccctttaatgactaaacccaggctgcaccactgccgcgacggcctaaagaatagatttagcgatttattgttcactttcacct

SEQ ID NO: 52082 - DNA, 1053 bp, Oryza sativa
attcctgcattcctgaatgttgctttggcacatgcccatgaatatgtgttaaaacaatcatgtgagttgtgggatgtaaagtgtgaccttttatatgtgcctaataaaaatatatatttttttcagttttttggcaccagctggtgcactcctatagggttttcctacaagtgtccactcctgttttttatttgctcaggtcagtctagttcacaccgtttgattgagagatttaaaagctgatagagttggagttagaactctgttaatcaggcactaaaagaatacttaatttaatttagtcgctcgttgtcgccggatctcacacacgatgaccagaattaaacatcacccgcgagacgcgacaaagctcatagcatgtagcaccaggtggtaattaggccctgtttttttcagcttgggattatcataatccagattattagaagtaagctgaaagaaacagacaacttattgaagtagcttattataatctggagcccagcttattataatctgataagctcatttaggtgagctttttctagactattgggtgaaaaattacccaccatgccaccccacttcctctttagatttgcaaacccaataatctaggctataataatctaggaaagaaacaactaaccacttattctactacatattataacaatctagcttatagtaacctgattcaataatctagattataataattccaagctgaaagaaacagggccttaatcacctaaaccaccacgtttttggagtataaatgattacggcgtccaaaacccaactactccggtgcatgaatcacgcctccgagcgccccgcaagtacagccaatcaatcaacaacgagaaagcactcgtactatatactccatccgtttctaaatactaaatatttgacatcgttaactttttagcatatatttaaccgctcatcttattataataaaatttatgaaacatgtaaaaccatatgtatatatgaaagtatatttaacaatgaatcaaatgataggaaaagaattaataattactt

SEQ ID NO: 52083 - DNA, 622 bp, Oryza sativa
cttgcatccttgtactttgcagtaaagtgctaatattttttttttacaattaagtatgaataaataggaagctaaaaaattttaaaatatgaattgaaagtttgaaatatctagagttagggcccctttgaaatggaggattagcaaaggaattttggaggattcattttcctaaggattttttcctatagagccctttgattcataggaagaggataggaaaactttcataggattgcattcctatgaacaatttcatagaaaaataagcaagaggttagacctcttgtgaaactttcctttgttgagtgtatcctgtggtgtaatcaaaggactcttctcttcatttcctgtgttttcaattcctgtaagattagaaaaatatacaacttcaatttctacgtttttcctattcctatgtttttcatattctgcgtttcaaaggggcccttaaaagttttggaatatgaattaaaagttttaattgagttgaaaagttttgcaatttaagttaatactgtagtttaaaatttttgggtggatttttctttaaaaaatgatttgagagttttaaagtttgagtggaaaagttttgtaattttagttgaaagttgaaatttgg

SEQ ID NO: 52084 - DNA, 3214 bp, Oryza sativa
ccccctaaagctgtaatgttttccttcgtggacaatttctgtacctgcgtcttactctcgagctgtgtgtaaaatctcggaatttctggctgtcaacgtggtgcgtactgtgatatataatcacatgtttggaatttacaaatcagctgctgccttttttttgtttgatccggtgttcttagatagcaagagaagcacatgatgattggtatgcattatatatattgttgggttgccatgttaattaagtgatgggctcttgattaatcatgtgacaaaggatggtgcgcacttggtatattaaggcccaaatcgaattcttgttggaccttaatttagctggtgaaaggattaaaatgtagtaaaatcgagtccaattcatcccaatccattcagatacattctctcaccaacaatttgcctcatttaaatctctcctttccccaacttgaagagtcactggtatgtgggttcatagcaaagagaaccgatatgacagtgaaagtaagtcggcttaagtcaaagtatctgaatcgcatcttgagagcttggtgcctagggtggtagctagcgagctacaatgagtagggtagggcaactaaaaggttcaaaatgattttgtaaagtattgcaatcacttattagattttgagtaaaatgcaccggtggtattacaacttgcaaggtgagggtagtttagtcactcattttgcaaattgcttaaataagtcacttatcttccttagatggtgcaaatcctaccaaatacattgtcatatggattgtttgtttttaaattgaaagttgtattgacccaatcatgcatttttttagccatgtgggcagggcaagcattaaaattataaattaacactcgtattttttatgtatatgctattacttctactttcaataaacaagatcatatttttagtcgcattgcacattggcttatttatggatcgtgtgatcatgtttgtaaacaaattgacatagcatataacttcattgcagacaccccacatgacacatgttctatgtgatttgcacccctaaaacaagataagtgacttgtttgagcattttacaagatgggtgactaaattacacctatctcacaagttgtggtactaatggtgcattttactcagcatgtaggaactttaacaaaaggtctaccgtgcatatataaatggatgactttttaactgtgacgatatgcatccatcagaatatcagattgacagcaccactgcatgcaccaagtggagagcataaatcctcaaatatatgtcacaaataccagaaatcatgacctttaatttgattccatcggtatcattcccctattataattagatcccagcatacaatcaaacacagacaacagtttattccattggatgctcctctacttcgttttctcaataggaaaaaagctaattatttgggcttcagtagtaatgcagcgacggagatttgtctgatgaacaatcaaaacagacaggaaccatgtgtccatgtattcttctctgaccatcgatcacgatcgatcgccaagtggttcgtcgtcggaactccagcttcggtcgacggcatcgttgtcggctgcgatggcgattcacataatgtgggcaaaagatgatgattatgaaagggcaaatatatggccatcgaccacatcgcatatagctccatagtgccgacagagttcatgtctaaaggtatctcaggctccgttattttcagttttattcatctgaattattgccacggattattttcttgatgcttctgaaaaaaacggtttgtccaaataaagtttgatttgatttcctgttgttatatttgctaagttcatttctcaaaatattgaatttatccatataatcgagagtagataatccgcgataataatctgatgaataacaagtttgaattttgatatgttgttgttgctgcaatgcatctgatcaagccactgtcctttttcccaaatcatggaggcattcattatgcatattcctctggaaacaagctagtagtatagcttagtagtcatggtgatcacccatggatccatcaccaggttcactgaatctgtctggaaatgcggggcaagttcaatggatctctgcacggttcagacgttcagtttggtacattccgctgtccacccaccgcagtgtggatgcatgcatggtcggccaacgacagagaagaagaccttacattacacacacttaataaccttttgaaggaaaagtgctaattaaggaggagataacacacgctaaccttagctacttcctccgtttcacaatctaagtcattatagcatttctcatattcatattaatgttaatgaatctagatagatatatatgtctagattcgttaacatcaatatgaacgtgggaaatgttagaatgacttacattgtgaaacggagggagtacttggcatttctaaatttcttattgcaacaaaattaaccttaaaccatcagtgccaaatcatgttcctattgtgtatatgtacgggaagttggtcgtggtgagacacctaggcccaccctcttttggattgctcctagcttcacctatttcaggatcttcagctcttctaaatagtcggctcgacattacaagtgaactaacatatattacccattgaaattatatagtgaatggttatattaattcagttgttcaaaggtgcttataggcatagagggtgtgattaattgtaccgcatttctaaatgaattgaatccaagtattccaaatgggatacaaatacacaaatgcaggaattaatcccgagttaggtatatacctcgtataatcgtattattcacggtacagtgactctaccttaagtgtgggctgcacagtttttatgccaagaacaggtctgaatctgataagttcgattgtgcagtgaggataagagcacgtgttatagcttatcttcaacgtgattgaacacttaactttactttgttatgtttcaattcattttaatgatattaagacaaatggccaactataaccaaatcttgtaggcaacagaacaatattaacaaggtactatagtagtgcatatcttaccgtgatattatccaaaatcttttttactgcacgctctccaaatagctccctatatcccaatccttctataatttattatgccaacaacgttcggtcaaatt

SEQ ID NO: 52085 - DNA, 2012 bp, Oryza sativa
ttggcgactgcaaggatgaaacccagacgcaggagctgctagggtttcaattttttttgggagtttttttttgccatttttctttttgcagtcagacggcttaagcgtctgcatgtggaaatacaattttcgcatgtggttgctctacccgcataaaaaatactgatttttgcagataccagatgcagatgatgggctacccacccgcctgcgagaatcaattgggactgcatggaaaaatcatttttatagtaatatactcctttcgattataaatatttaaatatttggtgtttagcacaagatatgatcactttaaaattttgatatcttttagtaattttcacgaaacgataattacagaaaataagtttatcacaaaatgtaactttatccccctatgtgtgtatgatatgcgagcctgacttacaccggcatgagtattacatgtttaagacatgtgggccagaagcttttggacaaataaagttacaaatttcttataaaatcatactctattattacaactcaatgaaatgtctagttaaatttaaagttgaagtaaactaataattttgataaaatagttacaataacctgaaatttactctaatttataattattaattttaaattattttaatattaaattgatttttagaattttatagatcttatcttaaatatcaaatatttatgattggaagagttttcttttactttattgaactgatactgatatttttctggaaaccgatacggatggactatttatttttggaaagtgataatgatggttaggtctccaattattgtaattaaggtgctaaaagcaacaaaaatcttagtacagtgttagatcaagacctgcctcagtgacaggtaataatactcttgcatctcaaaataaaaaaggtcttaatctagtctctccgacgaccagagctttgcaggcaaagtgagagcattgatgcatgcacatgtagattaattggagcatatcttgattcaataatataggcatatccacgcaaccctaatgcacattcgctaaagtgtgtctaataatttatttccatattttaactaagttttggagtaatcaatgaaagtacaatggtttgtccaaggcttaaaaaactactccatccattccaaaatataaagcacaaccacccttaaccttcaaagatcaagaaacaattattatcatgttctagtatggatcactctaataaatataatgcatgcacctaatagaattagatatcttgagggtgaaggatttaaaaataatagtttagtggagaagatatgctaattaattgcatgcatgcatagacttcttatattataaaacatcttaaaaaatagttgtgccttatattatgaaatggagggagtatgacatgatgaatctgtggcaacaaagggaaaactacattaaaaatttcacaatgtttgataaattgtgatagcaaaacaaacaacccctgttatcttttatatctctctttcttgtataagaatctggaattttcttggcggctgaaactgtcaagaatacctaattttcttgcgaagtttcttggtggttcgacaccacccaaggtaaagtgtattcttattgctctagatcaccaaggttatactttgtggcttttcgaaagtttaatattctccgtagttttttttggcgattagacagccaataaaacttttcctcacggttagcagtcaaaacaaaatctgaatttctctatcactctagacttggcagtgtccgtcaaaatatattgccttggcggttttcatactatccttgacggtttttttgccaccaagaaaattccagattcttgtacataatgatcgagtctacttcctctcgagatcttcgggcaccaaaattttctaaaatgagggtttccatggggttatgcatatatatcggggcagaggaaggagccatatcgcacatttctttttcagagaaatagagattatctcct

SEQ ID NO: 52086 - DNA, 1585 bp, Oryza sativa
ttagtaaaacttaaaatagtttggttttgaccaaagttaaaacgtgttatgaactgagacataggagtcccaattaagggcccatgctgccacgtgtcaaggacgaccagtagtcaacgtcgactccaatatctttcttgctcgctttctatccgtcgtgaaagtcacgaaacatacttttttgccatgcgtatatgcatgcacgactgcatggattaataatacggcaccttaatttccttccattatctcatgtacgaactaaaccgcttaattagttaattaatttgtttggcaaagtggctgattggcatgcatatatatatttttggcctttggagatatgggacaggtagtactagttctaatctcagtaagacaaaatgaaccgaacaacttttcatccttggtgcgtctgttgtttaatcgaataattaatcaagttcggagcatgggtggtggtctaacctacagattgatagccactaagatatatatttctgtcaaacttttgtgtttaggagatgttctagttgtttctttcttcttttttttggctttgtgcattttatgcggaggccggggatgactcagtttgattgtatcatctcgatgtaattaactgagtctaaataaagcttctattatctaaaaattaatcaagttcatctcgttggtagtaatggtgggcatccaacttatgcagagctctaaaagctagctatagctatcatgcatgcatatgaaaccaagtgttttaattctcatgtagatattgggattcaatttattcgaggatctctttagcctcaattgaagtaaaggtattagtccctttcatataagtaacacaacaaaagcggattagattgacagatggtaatcaataatataattagaatgcaggcgctggtggctttgttaggtcggccgttgttctttggtttaattctggtcgtatgcattgttataattaagtgattaactgatctagctctaatattttaattaattccaacacatacaacaaggtgtaaaattgtgcacgaaatttgaacatctccttcttatttcttctcttagtgatactgcccaacataaagttgcaatagccttggttgttcagaattcagccaactgaaaaagattagcaacgctagtagacagatgatgcccaaaagttataaaaaatagtattccatatgaataaaacaatttagaaaaaaagagacgttgtaatgtttcattagaattacggaaggaacatttagtgacactttcttttgtatagaattctctttgattaaaagtaccactttcttcgaatacaagagaaagattttgattttaaaaaaaattctaagccttcaaatgaaagctttccttggtaccctctatatatgagccttattgtacatgacattaagatcctctttttattacctttgcacctccaaatatcttttttcccccgaaaggtcaactagcactacctttgaaactaagtcataccaagccgctagttatcactataaataaagagccacctaaaagagacatttaaaaacagcacttatctaaattc

SEQ ID NO: 52087 - DNA, 2608 bp, Oryza sativa
aaaaatgtagtaataattcgtgaactgaaaagaaaccgtgcagcagtggcagccggatgaatattgtgcagtctggacaaccctagctgaaaccactttagctcggaatttattctaaagtgaattgatttttatcctcttacatactactactcttttacatactacctccgtaaaaaaaaaaaagacgaactctggatttccgtgtccaactttgactgtttgtcttatatgaaatttttttataattcgtattttcattgttgttagatgataaaacatgattaatattttatgcgtaacttatctttttgtttttttttcataattttttcaaataagacgaacggtcaaacgttgggcacggaaaccagggtttatcttttttttgggacaaagggactaggctgtgtttagttcacgtcaaatttagaagtttgattgaaattggaacgatgttacggaaaagttggaagtttgtttgtgtaggaaagttttgatgtgatggaaaagttgggagtttgaagaaaaagtttggaactaaacaagtccatactcttgatttacaaatcgagaaatttgatctttttaatatttctaaccaacactcttcactattacattttatatagggatgtggccatgtgggcaatgtttttattttagaattgagggaatggtaaccaagcaaatcctcagtgtttttcaacagagaatggcaatctatctgcaatgtagtgaaaagttcgtatgtatcagtacaagctctgatcttgtttcgtccaatcggaaactagcgtgtttgccctgttttatccgtctattttactagattatttttacaaattatttgcttcccgctcctcaaattacattttaaaataaaccttttctactatatttgcttgaatcacttgttttaatgctatttgttaaatttggtttttaattatttaattagtcctacaataaagtgaataatccggtcaataaactacctgaaacgtgtcctatagtaccggggtgatcaagctagccctacatagatgcaacacaaacacaaaaataaaaggaaacccaatgcgcacatgcagacaaaaaacgagcaaaatgatgttgcattgttgatttcttgtgctgtcctcattgtgaaccagctgtctctccatgtatatatactgggagtaacaacaagtgtagtgataaagtttagtctatgcataaagtaatttgcacattgcttaggatctagcttaacaagcatatttttttagcgagatgcatcgatcagggcttgacgagtaattttatatgtcggcaccgaaaagttaccatggctttccggtttttcagacctctcgcttggatgctctcactactttattcagacatcatgttgagaatatacatgggcatgagtaactcggacagtatcatcatgtcataaggctctcgcctagcgaaaaaacagagctcattgtttgctcaaaacttgttagccacggtcaatttttaaagctaggtgagtatagctcaattagttatttttttcttaaaccaatccacataaatttaaatcctaaactcgatgtggtgctcgtatttacagttaattatttttttttataaatgatgttcatgtctatagagttgtttgtgtttacttcatcaacttcaagatatgccggctgagttttccgaaggtgttcataagaatatggtgtgcgtgtgtgcgtccacaaggatgaatgtgcgtgtctcgtgagcgcttgcatttgtaccgtgttttttaaaaaataaaatttaaaaattgatttttattttttttatcaaagtttatttttcatcattgaactttgagtcattaagaacacatgtagagaagttttatccataaatattttttcgctaaacaaactatggacgaaacgatggggatgatgttttaaagggcaagaggctatcagagttacaagcagagaaacacgttgaggtgattgtgaattggtggaagagacaccgagaaactaacattaccttggcagggtagcgtcgcttttgactcgtgtagtaatagtgtagcttgagcatgagagtgagagccatagacatgactgagtcaagtggtcatcagtggtcgtgatggcaagctgcagtgcctcgtgtgcaccatacctcctggctcagtcccaggcctaaagcttttggaaaacccccttttttttctttaaaaaaagatactacaaattaagaaaaaccttttcaatagctaaaataagattatttttacactattttatttttcctaaaataattttatttctaacaatcattgcattggggttcatgacaatagccatcccaaaataaatttatttttttatccatggaacacatgccaatacaaaagtaaaaagattagagtatctctactttagcaaatctcaatgcaactatttatcactttatctacttctaatataattattacatacttttacaaactccaatgtaatgattactctataaacgaacttatttgggacaaatgaagagatttaaaaatatgggagtacttaatatgggacggaggaagtaggaagaaggt

SEQ ID NO: 52088 - DNA, 1996 bp, Oryza sativa
actttagcctgtcatttgaagcaaatccgttgctaaagttactttagttttgttctaagttacttctataatatatgtaaattagacatatcataaaagtaatttgtgaattttcatcaaaatataatcatgtgagatcttgttgtaaatatttaattgttacgaacacaacagtgtaatcggattgtaaattgaatgagtaatttaagagaaaattttatttgaagcatagatgatgataagaatatttcccctacttgctcaatggattaatatcaaccaaaacttctaaagtaatagcacatgggtgactctggttaaaactaattggagaaccgtttgtgaaacgcctgtgcgtcacagactcacagggctgcctgcataaaaaaaaaatactgtaattaacgaacaaaaagaaaataaaaaaataagtatactgtaattaacgaacaaaacgaaaataaaaaataagtgcgagtgcgcatccggggaatcgaaccccggtcagtaccgtgggagggtactatgataccactacaccagatgcgctttaacagtgacttaactcaagacactataattatagcattttgtttctcgttgttgggacatcaatctgggcggtaacaataatcatagcttttaatctctcttagtaattttgaagcatatccaaattacagacatcgacaactcgaagatggatggagtcgtcccggcccaaatctcctgaatgcataattagcttaattggctcgtctagtcccaagtgtcgtccaatctcacttcactgacaaaatacacacactctatcgtattcgtctcctactccagccgtacaagccaagacgaatgaaactgtcatctgcctgtatgatactgtactctactacagtatctctccctggtgaattgtactactcctctcctccctccggcaaaaaaaaaaaaaaataaaccctgagttttcgtatccaacgtttaaccgtccgtcttatttaaaaaaattatgaaaaaatttaaaaagataagttacgcataaagtattaatcatattttattatctaacaacaatgaaaatactaattataaaaaaatttcatacaagacgacagtcaaacgttatacacggaaacgcagtgtttgtctttttttttttaccgagggagtactactctactagagtaagtacagcatttcacgtgttgttcgctgcagcagcaaccggtcaaaatgtgtgttccagttcttacactgatcagcaagaacacatcgtcgcagagtatacgcgtgacctttcaatgtgcgtctcgccatacctaatacatgtgacatattctattattataaatttaaacagtatatctaatatatatgtcatatgacatatgtcacatccggtagcactactcccttcgtttcatgttataatatgttttgactttgatcgtagtcaaactgttttaagttttaccaagtttataaaaaagatagtaatattttcgatccaaaataaatttattataaaaatataattaattattaatttaataaaactaatttggtaacttatcagtttgagagtcgatctttatcagtttgactttgacaaaaacaaacttaattactttgagatcttaataaattcgtttgaaactcttaattaattactttgagactctcaaaacaaacttgcatatataccgaaataaatttaataattaacttatcgactctcaaaacaaacttgcatatataccgagctttttaactctctatgtaccgtgagtccaagactaaggcgctctttgtttaggcttaggcttattggtctagacttttaagtcagcttattggcttatatgatttataagccaatggatttaatgtcctaaggttagtggttgagtcatacatctacctcacataagcccaaaaagcttctccaacctagcttttggcttaatagtgttagagtggcttgtggcttcaaaaa

SEQ ID NO: 52089 - DNA, 968 bp, Oryza sativa
ttttttttggcatcaaagtgaacaggccctaaataactattgtatgaattggctattacattggctatagatttggagctagtagtgggctatattattaaacttgctctaagcaacacccttttaacttcaatgtgatggagtattaaacaaggaaaacctacacaattaagagcaagtttaatagtatatcccactaccagctccaaatcatttatagccgatgtaatagctaattcatataatagttgcttgctatactattaatacctaatcccacctatcatacacacattgcgtcttggaatccatgttgcagctggctacagatctgtagcccgcagctcttctctttttttatttatctctttaaaatatgtttataactggcttatagcatgctattgtacctgctctaatatgtgtaatgtaaacttcaatgaaacagctactagctaaagtatatatctcatccacaagaagacgatgctgattaattaattagtgtcgtaaaagctgagaccaattaatgatggtttgattcctccgaatctccaacacaacgtacaaaaatccaggaaaaataaagtttatatatttgtctagccacataagaaacagaatacagtctgtagtgcattatctctggattgcggtttctccgtatacgagtagtatattcttatatgtcctcgctgtacctgaccttggaattttcgttcccagaagaaaagaatgagcatattagctttgtcctaatcagatcttgctggaagaactatatactgttccccagaatataagaattgtcaccatctatatgttgcttaatttatccaagatacacgagcacaaaaatatataaaatatgtaaaagcattcccctttgacagttgatctctttgatggtttctatagtctttaacctacgggaacatatccatgcatgcaagcttttggtaggtaca

SEQ ID NO: 52090 - DNA, 1757 bp, Oryza sativa
tgcgcatacaaatgcttatttgcatatatatgatacgttttcttatcctacaatactagtagatctcttaatttatactccctccatttcaaaatgtttgacaccattgactttttagcatatgtttgaccgttcgtcttattaaaaaaaattgtgaaatatgtaaaactatatgtgtacatgaaagcatatttaacaatgaatcaaatgatatgaaaagaataaataattacttaaattttttgaataaaacgaatggtcaaacacgtactaaaaagtcaacggtgtcaaacattttgaaacagagggagtaattaagagtttcgtattacttatgcagatgcttgagatatcataatttatgtactactgtataaacggagtcgtcctctagagtaaatttgaaaatatactgttttttttagttttttcacagtaatattcgggatgcaaaaacttgtgcagaaatataccgtcggtgtcgcacaaccattgcgcgaaaatgacgtgggaatgacgtcgtggacgatatcacgaggtgaccgcgcgagaccgcgcggtctcgcgcagcaatggtgcgagactgcgtggtctcgcggaatggcacagccacatcgtccagcgcccctgaagcaatcagcgaccctgtcgaataggctccatttgagtagtaattaattacttaattaacaattaactaataataattagcggttaattatcctgattagcgattaattaatcgctaattaaatcggccagtcacggtatcgcagcttgcaagagcgatagcgctgcttgcttgagcggtctcgctgcttgcttgagcgagaccgcgctgtctcgcgtcatcatcgcgcgataccgcgcggtttcgcacttccactgcgtgataccgaccacaacgtcatttccacatcattttcgcgcaacggttgcgtgagaccggtagtatatttgtgcaaaagattttacatcccgaatatttctaacaaaaaattgaatgaacaatatattttcaaatttaattcgtcgtcctctttccaaccatcatacttatgctgttcccatgctaaaaaaaaacacacattcaaaaaactcgtgttctaacaagtaaaacgaaaaaaagaaagaccatgtaaaacctttcgtcaatctccatcccagatcccgatgtaacacacaagcttggcactaatttagtactataagttttcgtattttttgtcttgatacttaaaaaacaggatgtataccaattgagaagtgcttctatgctccttgaaaaaaacctgcatggaaattaaagcacatcaatggttcggattaaaaggtgattactagtgtaaaccgtcattagcaaagggcaatttcgaccaggaagtaaaagcccacatccagcccaggccgatcgatccatcgatctgggaggtcgacacggcaacagggctagatggtgaagatcaccagatcggccgggcatgtgcgaggaatgggagggcgacgagctgtgagggctattgtcgacttgtcgtcgttgcgctcggcgttgagacagattatacagtatgacgagatataggaccagttctcgaagggcagtgtggtgtggaagcggcagaccagatggagaatggccgcatcctctacggcggcggccgtccatgatgactcaaactcctgcatggtagaatacccgcttcttgtacctagtgaaacctagatagaaatcccaacgattctcctattttttgatt

SEQ ID NO: 52091 - DNA, 1407 bp, Oryza sativa
ctaatcgtgtgggtaatccatggaaattttgggaaggttggtgatatgttttgtttgtgtgggggccaggatagatccttcggttttacatggccgacagttatgtttgtcttcattgcaatggatggagagaactaagtgagagaaatttttccatatctgtaataattgaatgcatggatgctattgcagtaaataaatatattctgcacaagatcgaattcctcttaagatcatgtgtgtatgtgtgtgtgtgttttttttttgcaattatattgtccatgcagatcgactttaataattgggcgttagaaataaattttgctctcgttttacctatttttagaaggaaaggtcgcctttgttcagaggacgtccctagatgagttgcaatataatcctagcagtagctttgctgacgaacaaagtcatgctagcacatttgcattatattgattgtccacctgcttaatttattgtatcctacgtacatctataaagtttcctgctagggtcatataattgacatttttttcagtaatacatgttcaaaagtttgcattatattgattgtgttttaacttataatggtgattgtaagatatatttcttatatattattgcgcggaaaggttatatacactggtggagaaaggggctttactcccggttgggaacccccctatagtcccggttatacaaccgggactacgaatccgggactaaagatacccatctttagtcccggataaaataaccgggactaaaaatccatctttagtcccggttggtaacagatggtaggagcagtcccggttattttttttctcaaatcgatctgctccctaaatatccccgatcatattcctaaatcatccccaaatcaaagtagcatcacagatctggaaagaaatacatcacatattggaaagaaatacatcttagatcacaatacatcacatcacaaaatctcaaacaataaatacatcacaaatcctaaaagaaatacatcacaactcccagatcagatccaatatcacatacatcacagattaaatctaatgaatcaaaaattcaaaaaaaaatcagcagcggagaggagggcgccgccggcctcccggccaccgtccttgcggcctccgcgcgagctcagccggccggccgccgcactagcccgcccgagcgctgcgcccacccgcccggccggccgccgcgccagcccgcccgggcgccgcttccgcccggccgccgctcaaagaggggaaggggaggaacgggaggggaaaggggagaggaaggggatgaagggggagaggaagagatggagaaggagtaatgagaggggaggagatcaagagtccgcggataatattgagtggcgcgcggttcggggttttctttactccc

SEQ ID NO: 52092 - DNA, 12145 bp, Oryza sativa
cagcacaggcacaagactcaagtgggcgcaacgtacgtgtaaactcgactttgacgaacgagttgatatgaacagcgacggcggcatggccctgtcggatctcggtcgagttcatcagtttccactacaaatttgtgcccattcctttgtatagcttcatggcccaccaaagaagattgacagtatagcttcgccggctagcttcagagcactgcaaaacaaatatataattaggcaatataattcatttattattattattattattattttaaatactattatctcaaatagatactaaccttgctgacatccaggacaacttgattctgtttttcgcatattccttatcctttgcttctttagctttggttctctcggcttccatagccctcctcttcgcatcttatttccttggaaggattttaattccctatatgaaaaactctcctttttgtttcctgtatacagaccaggtctacatctctatctttgatcacctctttcaatttgatactaaccttgctctttaagaatagccacatatgctaccctttttgtatcggcaagttcagccttagtctctttcagttcctcttttctctcagccataccctctttcagttcctcttttgtttcaattgtgttcttctttaccagtctcgacctatttgaacataaatgttgtaaggggatgtgaaagatataggatacatatcctttgaattctatatttgtgcaatctcgaccttaaaagcccattaaacattatacaaacacactacataaataccctataaacgctcttaaaccatcacacggcattataataaattaaagaaatcctaaaaattttgagaaaaaacaaaatattcgacctttgattttcacttaaaaagtgaacacattattttaggtcactagatctattatagataacaccgattaaatatatctcaagaaacaatctctcctcccaccctttggccgtacgtacgcatataaatacgcaacgtatgtactacctccatgcacaaatatatgacgttggttagctcaacaacatcaaacaaaaaaatatggagggagtacatgcttatccctcccctctgaccctccatactcttatatattttttaattcactataataataaaaacaattaatacttagatagcttagtaatttaagacccatataaaaataatgtaaaaatgaaaatacgttatttgaacagatctatgttttggagggcaatcaaataacatccattttttaatttatttgaactatagttttatttgtaattaaaaaagtaatttaagatttatattactcatattttgctatataaaattaaaatatataatttgaacatagtccaacaatgaaacaacaatggaacatttgaaatttagcaatatgtattgtgtcatcttaaatcattctaagtaataaagatccattaaatattctttatggtgttattaagtcaacacatgtcatattttacaaatcagagaaaaaatcttacaaatttaaagaaaaaaaataaaacatctgaccatgaatttccacttacgtcgttgacatattattttcaaacattagaaacatgtcatgtctttaaaaaatagaaacaaaatatctgagaaaaaaaaatctgatcattagcttttacttaaatagcttagaaaaaaaagctccctccacctcccttgctcacatgcacgcaacactacccaccccctcctttttggctcgagctctacgctagctattcatttgttataagctatcaaggtgaaagaggaacaactaatagttaatagttaatagaagctacgtatatgctgtctaatcttaatgctgctctattataaccaaaccaaaaatttaagatccatatgcatatactacctccgttttttaatagatgacgccgttgattttttcttacatgtttgaccattcatcttattcaaaaattttatgcaaatgtataagatataaatcacacttatagtactatgagtgataaaacaactcataacaaaataaattataattacataaatgtttgaccattcgtgcctccgccgtcgctgaccatgccgcccagtcgctgccgcgccttccgacggccagccatcgtcgccgtgagctctgccactctggcctcacctcgcgctgcgcagagccggccgcgccgcctagtcgctgccgcacctcccactagccaaccactatcctcgggggcggccacctccgccatcggccacaaccatcgcgcctatgccggctaccatcgccgcgggcttccgccacctccgcccgcctccaccaggtctccatcgcattgagcaccaccaacatcggagtcgaccactcttgatctagccgggggggggggggggggcagatccgcgttgatggggggggaccggatccgtctccagcatgaccagctccgtcgccctgccccgttgaccgcctcggccgttgcctcccacgccgaggaagagctttgccatcagcttgttctccccgccgccacctttccatccggccttgcggtttccaacggcgggctccggtggcggcgaggcggctagaggggaaggaaggtggtggcacgggcgggtagggtttccctcgagccgctcgcgtgacagcggcacgagggcatatgctttgctagctttttggttctctgaataatggattctatcttggcctatgttgttatgtgaaatggtgttatatattgattctgagcctatatgctaccattattatatttcattacaacccaaacattccaaagtttttctgccattcgatacattacaagttgatgtaattttttttctagttagcaggttcattcttactcatacctaatggaatgtaagaagcgttgtgaggacaagaagaaacactatatcgatctatcttcatggatttggaagagtttcaatgatttaatggagaaaaaatcaactatgattcaagaactcattgatcaattggaggataaaaacagatgctctatccaaaagttagtccacactaatgttgtttggatgcatacaatatattctgtcatgtttttctaaacatggctattcttttaaccgactaccgccgtgtcaagcaactaggtttgttaatttcttacacatttgtctttccccttgcccttcataatatgcatttctttggtgagtaatttcaccaagaacgagtaaatgaagagattaattggaaggcatagaattaatcatatgtattttgatgatctacatctgtcattatgtatatggtgttatgcagagtgcgatgccgacagatagatcgagttacatctgtcattatgtaacgcagacagagtaatttttttttttatgttctgaaaaaaaaagtatatctttttagttccacacacttggaattgatccaattctaagtctcctgcagattttggcagcaagttcctcatacgtcattcagtccacacgcttcaagttagtcagattgacctgaaagacaaagccaagcacgaagagtctaaatttcaaccaaatgaattcgttcggtcatcaaatgaccggtggttaaactggcacatataagtacaatctgcctgcatgcaatcttcagtcagctcttgaaagttgaataatcttcagacaccatatatacgaattctgcctgttaattaatccgtcaagaacgtcccccctgcgtaccggcattgtcgttcaggaaacttcagcttaattttcttcttctcgtttgaacagcgagagatcgatcgatcgagctgggagaaactattataagtagctcgtatcctctgaatctttggactcacaccattcctatacagcaacctagccagctcagttaagctgaaattaaacaaactgctgcaagctataactagagctaagtcacagttgtacatccgggagcagaagatgaaaagaggaggctcgtcgtcgtcgtcggcgactgcggtgacgatgacgatggtcgtgctgctgctcgtcgtcgcagcggcgtcgctgcgtgccgccgacgccgcggcggcggcgccgcgccgcctgctgggagctgacggcggcggcggcggcgggtcgccggcgctggtgtccgagagcaaggcgtcggcgggggcttccacctgcacgcacgaccccaacacgccccctagtggcactccttgcccaccgcataattgataattaaatcagctgcacgtcgtgcaattgcatgcaagattttggctgattaattctttcgtggcgttgattgaaatactacaggagtatatgtctatgtttatacatatatatgtacaacaagtatacatgttaatattgttcgtcattggttgtcgaaaataaaagtagagttaattagtttcatatatatcattgatgcacgcaacatatatagctctgaaagtagcttgtaaacattacagagtatactgtaatttattttgttcagtccatttacttgtgtgtgtatatatatacccccaggatggttacacgctgaaagagcatcagatacgaatttgtcatattcgttcaatagcgaaatacaaagctaatcttaaatttgttatggggtgtgtcatctaacaaatcatgtttaacaaatcacatttaggatataaatttaggatatccaaatacaccgctaatcatgttttattttatagaaaacatatacaacgttatcccgttggaacaggataccgttctatgagacagtacttaatacctgacacctgttgtggtactagctgcatggtagctgatacctgtgatatctgctaccagtacctgtgatacctaggacctgatacatgtgacactcgtgcaagagaatagttaatatgtctatcctgttgcaatgggatcccgttttgtagcaaccctcatctggttaagaattttgtattgagccccctcttctatagtatatccacaaatcaactcccagcactcccaaatccactctcacctagagacggcaatggaccccgttcaccgtttccctgcggtgaattcaccgtcctcctcctggtcgtcgtgtgcgtcgtcaaggcagcgatgtggcggctggcggtgatttttgcttttttttttggtttttttggttccgtgcgggtggtataacacaaccgcatgggataattgattattctgtgcggtcggcccgcccacacgcgaaaatgccgattttcccagacacccggctgcagacaggccggacaaccgcacggaaaaatcaaaatgcccgcacagaaaaatcttgtatgtagtagtgactatcgatctatcttttaaggattatgaagagttcaataatttaatggagaagaaatcaactatgactcaagacctcattgaccaattggaggagaaaaacagatgctctttccaaaagttagtccacactaatgttgtttggatgcataaactatattctgtcatgtttttctaaccatgactattcttttaaccgacagataccgtcgtgtcaagcaactaggcgtattaatttcttacacatttttgtctttgcccttgctcttcacaatatgaattttttggttaggaatttcaccaagaacgagtaaatgaagagattgattggaagacatggaattaatcttatgtattttgatgatatctgtcattatgtatatggtgatgtgcagagtgcgatgccgaagcaccagtaacacagacatagtatatcttttagttccacatagttggaattaatccagttcttaagtttcctgcagattttgtcagcaagttcctaattttttttagactttttaaattttttaattttattaatagatctttcaaagaaatattttcgagaactgaaacttttttgactatgcggccaagtggctggcgtggtaacgttgttttgccacgccagccacacggtggcgtggcaagaggctggcatggcaggacaatattgccacgtcagctgcgtgtggtgtaacaaagttattacaccagtcaggctggcgtggccaaaagattcagatttgaaaatactttttaaaaaatatattaataaattttaaaaatagaaagtctaaaaaataaaaaaaatccaagttcatcgtacgacattcattccacacgcttcaagttagtcagattgacctgaaagacaaagccaagcacggagagtctaaatttcaacaagaaaaaaaattcggtcatcaaatgaccggtggttaaactaacacatataagtacaatctgcctgcatgcaatcttcactcttcagtcagctctcgaaagttgaataatcttcgatcagacaccatgcgaattctgcctgtttaatccgtcaagaacgtcccccctgcgtaccggcattaatgtcgttcaggaaacttcagcttaattttcttcttctcctttgaacggcgagatcgatcgatcgatcgattgaactgggagaaactattataagtagctcgtatccctcctgaagctgtggactcatcaccactcttcagttaagcttacataccagctcagttaagctgaaacgatttagttcgaagccagaagcaggccggagctgaagatgaagggaggaggctcgtcgtcggctactactgccgtgatgatgatggtcgtgctgctcgtcgcggcggcgtctgacgccgccgcggcgccgcggcgcctgctgggagctgacggcggcggcggcggtgggtcgccggcgctggtgtccgagagcaaggcggcttccacctgcacttacgaccaaaacacgcactctaatggccctccttgcccaagtccaccgcataattaaaccagctgcacgtcctgcagttgcatgcaagattttggctgattaattctttcgtggcgtcgattgaaatactacaggagtatatatttatacatatatatgtacaataagtatgcatgttaatattgttcgtcattggttgtcgaaaataaaagtagagttaattagtttcatatatatcgttgatgcacgcaacatatatagtgctgaaaaagtagcttgtaaacattacagagtatactgtaattttatttgttcagtccatttgcttgtgtatatataccaccaggatgatttcacaaagagcatcagatacgaatttgtcatatttgttcaatagcaaatacatgctaatccttaaacttgtaatggggtaccatctagatccgaacttgtatttggatatcctaaatcatggtttattatatcacccgatatataaagtgcagatgtaacaacttgaacgttgttgtgggcgcgtccaggcagtttttgttttagctatctagttgagaattttgtatttagccccctcttctatagtatatatacaaatcaactcccaccgtaccactcccaagtcgactcccatcgcacccgtgggagaggaggcaaagagacggggatatattagtgttgctgcggtcatctattattgaaggatgtcggagccaagatagagggtgatcctacgagttcaatgtggtgttattgtacaatcgcgcgctgtgatcttcccgtaatatgtagtcaaacgtttggcttcaattgatggtgacaatcacgccacatcaagctcgcgagatcactctcttcatatcatacggtccatcttggtaggggagaaaatgaatcgaataatatccgatctggcctgctctgaatccgtccaaaacgaggatatgaaatgggtttatagaaattcgacaagtgtggattatccgatagtatatttgccggataatccaaaattatcaacctacataacaccatatttgttctatacaacatgagctgacttatccaataatctaactcatcaattaattctactctttagtttgaggctcctattgtctcatctcacacttacttagctgcatttttatctatactactttatgagataatctaagaaatgctgttgacaagcgtccaaatccaagaaataccatcaataagtgtgagtttcaagaaatgccatcgtacaaatgactttgtctcaaaaataccatcgtcgttagggttccgttcatctcgcgcccatccgcctctattctattaattaagatgattaattaagtataacaaatttttaatatatatttattcaatttttaaaaagcttttatatagaaagtatttgaaaaaacgtattgtttagcaattcagaaaatgtactcacggtaaataagtgagtaggcaatccaataagcgctttaattagaactcaactcatcagggagctacagggacatcttcacatcttcagttatatattcacgggctccatgttcagtcagctcttgaaagttgaatgttagactcaaaacttcgcaagaccgtcatccagataggctatcttagttcttcagacaaccatacgacgaattctgctgcctctttaatccgtcaagaacgtccccccatgcttaccggcattttcgtgcatgaaacttcagcttaattttcttcttctcgtttgaacggcgagatcgatatgatcgatcgatctatcgagctgggatctcttataagtagctctcgtatcctcctcaagctttgcactcaccattcctgcagcaacttagctaatacacttatgcacctctgcttagtaaattaattaagcaggaaactgcaaaagttacagtagtgcagaagctaagtgcagtgactagtagtgtgacatcgtcggaggcgaccggccggaactgaagaataatgaaggcgaccgcggcgatggtggtggtcgtgctgctcgtcgcggcagcgtcgttgcatgccgccgacggagccgcggcggcgccgcgccgcgtgctgggagctgacggcggcggcggtgatcagtcggagagcaaggtggaacataaatccggctgcacgaacaacgataacacacccccttctggtgtctgcccgccgaacgcgccggggccgtgattaatttgttcagctacacgtcgtcgcccgcatcgcaaaattaatactcctatataaattaattaatcagtataaattaatactcctatttggctgatgaattaattccttcttggccttgatgaactatattttttccgtaaataaaagtaagttcaggtgtgtacttgttgcatcgcgtttgatgcacgcaacacgtttaattgattcaacgaatgttgatttgttcagtatactcattgggctcttcctgtaaaagtaaatgatgaattttgttttggtgttttgttttgtgtgccccgcttgaatctgcacaatacattttggaataattatattaaggatgtcggtctgaacaaacacccatgttaaatacagtaaatacaaacgtcatctctctctatctaatctacctatctaaaaaacgagaaaaaacaaacagagacatacaaggatttgaaccgtttagacgtacacattgttatctagacatgtggccacgatcctgctttcttatatactccctccgttatgagatatatgacatttctgacagcatcgacgaaattaagtatacaacggtgaagtgaacatggcttaactagttaactagttatgttttttttaaacaacccacgtacctaggttcatgacctagactagaaatggattctcgtatttacgactaattattttttcagcgctagccgacatacccgtcaacatcgaggtgcccatggtgacttcgtcaatctcaaaatatctcaacatagtctttcggatgtgctaatagggtagggtgtatatgtgtgttcatatatatgagtgagcatgggcgtattgtgagcacttgcatttgcactgtgtgtgtttttttttaaaaaaagtatagagcgaatttactattttaccctttattcctcttcatcgatgtgtttgtccatgccgctgcgtcgccaaagccttggacgacgaggaggaccgagggggtttccgtctcccttcacgccggctcgttcgccatctctcccaagccacctcgaagctggctcactcgccgtctcccacatgccacttctcgtgaccacagtgtttagaatagaaaaatatggatctcacaatgcttagagagaaaataaatgtgggcgtgccagtgtatctaaatacacaaaatataaaacatgtacaacatatacagatacacgtgatctttattaattgaattaataagatatagttttcgtgtataatataaaaatcatgcaccattgcttgtcgttgggcagatcttgacatcagcgatgtgatcttctggttctcaggacctcgagaggctactggttattacctccataggttagaacctattggagaacctccgaataaactgcttgtgatcatctttttgtcttaacttcgtgttcttcatgcataatgataagatgggtgttgatgtagatgtgtgtgggtgccaacaacatatccacggcttcgtcggttcgtgcgccggtatcggtgacaagccttcatatagtctcgatccgcccgccattattgttcaacctcatcggtcttgaacaacgtgtaagtgtagtttgttggtgaagacatgatttgcgtagcttgaatagctcgatgtcacaatagttgcatcgagattatattagaaagggagaagccattggagaccgtccgtgttgatgatagcctaattaatcgtggcttggcacctcctacggattacgacggctctataattatgtaagaactagaggttggttgcattgaaattattacttcacgactgttaactagcattagcatatgaatctaaactgcaattttattaattatttgcatgcaatacattaatatgaacaatagcatactgaaattatgcactgccttgcaatatttgatgattatttaaaaaattaaaatatgacacactcaatttccaattgtcagttcctcattaattatttgaatagagaaaaaagtataaaatggatttaatatttacctgaaaccagcttgacctgaatacgcctgtaggtggtagctagttctggtgatcgatcagattgtgtgatccaaatggccgctagctcaggttatccgtgacgtcataggaggaaacttcatatgcattacatcatcagattaattaattgatcggtcattctatattatcccaggcaattcaacgaagtcacgattcaattcaactattcaagcagtctttgcgtcaaaaatgaaaatattcaagctgtcaatttgatcaggggctgtcagtatatttactgtacatattcttgtgacaattcagttctcaactggtatcgtacgcaaagaatgctagctggcacgtacatacatgtgcgaccgttattccaacagacatggcagtcaaccgggtcacatcatgtaaactagctgcatttaattgtatgtttagttccatgctaaaattaaaagtttgactaaaattgaaagtttgaagaaaaaagttgaaagtttatatgcgtagaaaaattttgatgtgatggaaaagttagaagtttgaagaaaaagttaggaactaaacaagggctaaaaactggatgaaagacttacaaaaaagagagagagagagaacatttgtatgtacgtagagagtctattttaaactctcaggagacttcccttggttacttgcatgttactcgaatagttatgaaaatttttttgagtagatgtattaatatgtgatattaatatcactctacaaacattcaacttttaactctataaacattcaacttttacatgtcgccacgaaaaaaacattttgattgtgaacatatcactgctagagaaaccatctttggtcggtcggccaaaatttacaatagtcctggttctaataaaaatcaggactaaaaacatattaatttagccccggtttaaaagctcaggggtactttttgacaccaacgggactaaagatcatttttagtcccggttcaaaaaaaacagcaggcggggttagacacctatattttttttagtcccggttggtgttaccaaccggaactaaagatctatttgtagtactggt

SEQ ID NO: 52093 - DNA, 7735 bp, Oryza sativa
catgcgcacgcggtttctatctcctcttccctcccggttctatctcctcctcctctcctttatctcttctcctcactcacccttctcttcctctccttctcctccccctcccccctcctccccctcctccccacttctctggcaggcggcggcggcctcgcgtggcggcggtggccgggcggcggctggcggtggaggccggcgcgccggcgaggaggccatggcggtggccagcggtggaggcgggcgtggccctgtatgattttttcttttttcctttttgattcgatctgtgtgattcgatgtgttgatttgatctgtgagaatgaactatattgttgtgaatgattttgagaatgaactatgtgttattgtgaatgatttgagatgattatgtttttgtggatgatttgagatcgatggtgagagatgatattttttaatgatttggagatattgggtgcgagatatgaaaaaaagaaaaaaaacctgttaccaactagaattaaaaataggcatctttagtcctggttgtataaccaggactataggggattacgaaccgggagtagaaagcctttctccagtatgttaactatttgtagtttaatttgctttttttcattgcgacatgcagaaagctgaattttaagtttgtcgagtgatatatcacatataaataaatcttcttagagcttttattaactatttaaaaatgacatgcaaacaactgtaagcatcctctgttcagaatagtttccctatgtatgtacatacattacagagcttatcagttcggctttatcgtgattcatgatttcaaagtgttaaacggaatattttatatattagtaaagttttttcttaaaacgttatataattttatttttgaagaaaaaaaaccatcatatagctacacgaagatatatatagttgaagaaactttgaagctatatatactatgcaaaatgaatcgatccatgcaaccatttggattttcaacgtagaaaacggagaaaaatataaacaaatgctatcgatcaatgttggacccgcagtctcgtatgaaatgaacgattggagaaattttacaacgtttttcccacataatctattgcacgaaaaagctaaggtaatctcctgcttcgactcgagacacaggagactagctagtcaaacgtttcgcagtgaaaaacaaccgctgggaaaggagtgatgctgaacattctttgtttgactagcttgacgcgactctagctagctagctgaacgatcagtacacacgcgttttgttcatctgtgatgcgatgcttaaattaaacaggtcgtctcttagctaccctccgttttaggttataagataatttgactttggttaaagttaaattattttaagtttgactaagtttttacacaaatatagtaatatttacattaccaaattagttttattaaattaataattaaatatatttttataataaatttatcttggatcaaaaatattactattttttttataaagttagttaaatttgaagcagtttgactttgaccaaaattaaaatatcttatacgctatctcgatcagtacgttgcagaccaagcatgcacaacgtttattatattttcgcctctttttcttacgtaacatccatgtcatcatctagccttagctttcatgaattaatgatgaattcatcagtgtttttcttcatccggctggccggtggtctcatcattaattcatgcatgcagcgtacccttagctttcccagaaattctcggtttaattcctcgatatatcgatctcaaccatgcgtgcttcagaagctgttttttagatgacagattcagctttgaaaggaaagcccaagaatgaaacatatatatagtctggccgaaagcgatcgagttgatctcatcaagacatcaaccatatatagggacatcacgtgttcatcaaattaatcttcagtcagttcttgaaagttgaatcttggactcaaaacttacctccaccgttttacaatgtaagactttctagcattgcctatattcatatagatgttaatgaatctaagagaccttttgcagcacttggaaggtacccaaggtacctctcctcaacttaaacatccaccgttgattctcaaagagtagattaggaattgaattaacataaacatgggcagtttagtaattgttctttagccatcgtaatcaaccgttctttattcttttgctatatctttctgcacacctggatgtaatttttcgatccatccagccgcacacatacccctatataatggatgactcaaatttcaaaactaggttttatacatccatccatctttattgtctttagaaagtaatccatacaaagagacggaggcgcatcaatcaatttttcgtttggaaatcttcagagtcacatgcaaatctcatgcggatatatggaaagacgcgtggatcaattacttagttctaatcatcaattatgtggtcttcaattagcatctagttacacgatctgcaaacattaatcaagtactcctagacgccgtagttagtttcttcattagttatacagattaggtgcaagccgtgtgcagtggcatcaacagactgaagacgttatcatctctctgcgctccggccgccggagcagcagaaaagtttcccgtttagttcttcctctctttatgaaatatagaaaccaaattacatatctaacctttttcaagtaatgcctggcccacatatttaagtaccttttcacatgtatgtggatcgttagattggaagccatgaacagatttgacgcactccaaacacagtagaaaatctctgaatatatatatatatatatatatgtctagattcattaacatttatataaatatgaaaaatgctagaaagtgtcacattattaaatggagggagtagtacttcttcatcagaaaccatgcataccaattcttccagtttgatccgtcaagaacgctgtcgatcaatcgtgcagctaggaaacttcaccctattttttctcttgatcgcgtttgaacggcgagataatctcgatcgagcttggactgggagctactagtatatattataagtacatctcatatgctcgatcaccacacctgcagcaattaataacctagcgcatatcaacaagcttagccaagctgaagcgaactgcaagatagctagctaattaaggaagattaagccggaactaattaatcaagattgatgaaggcgaccgcggtgatgatggtgctcgtgctgctcgtcacggcggcggcgtcgctgcatgccgccgacgccgccgctcggtggcgccgccgcgccgcctgctggccggagctgatgccggcggcgccgttgagtcgccgccgccgccgccgccgctggtgtctgcgagcaagacgtcatcgggggcttccgactgcacgcacaaccctactaagccctccactggtccatgcccgccgaacgccccgtgattaattaactaattgaccagctacacatatctattaattaattccttcgtggcgttgattgatacagtagtactacattatactccaaatatttactcatatatatatgtagtatatatattatggttcattaactatagttggttgtcgtaaatactattataggttcagttcgttaattaattagttgttcttgggttgtcgtcaataataccagtaggcaaacagtgccacacatatatacaagtgtcaccgtgtcgtagcttgctgatgcgaaccttagatattgctgtagtttgatttgttctgttgatttatgtacgtatacctcacaataaagacaaacaaattagtccattaatttgttcagtatttgttgggttctgtacttctgtctgtaaattaagagcatgtacaatagtaaactataagccaactataaccatatatcgagaagaaaagagaggagagagaagaaagtgtgctatagatttatagccggctgcaacacggactccaaaacgttgtgtgtgtatgagaggtgggaccgagtattaatggtgtaatatatttttatagttaactattgtatgaatgggttattatattaattatagttgttttggagccaacagttgactatattattaaacttgctctaaatgacgatgaatattttttctttcgccaccacgaattgaattccctgatgatttttgtttggtgtcgtgtactcgtgttccccgcataaatttgcacaatagatttgggaattattaaggatgcctatcctgaacaaacacccatatgcatatatactagaatcagtataaatacagtcgccatctctcagtctccctctcggcatgcatgtggacacaacccacggctttcttgtgtgtccttttcccaacattcaaatagaatctgttttcaagttttattgtatttttatttacattcctacatttttttggttagtcaattaatttgttttatatgacccaagtcaaagcaggttgcataagcaaccactacccagaaattggactattcctgatggcaggaaaaccatcactactggagaattgataattctccggatggatggtaaaaattacattagtttcggttcaaatagaaagcaggattaatttttaggttcaaaagccaacgaaacttttttatctttagtcccggttgataacatcaatcgggactaaagatcattttaggcccggttcaataactgtcaggccgtgtcaggccatatatttaatcgaatatctctctcacacatccttatctttatttctcgtccttatctaccgggcgcgcctctctcgcctcacctctctcgatctttctctcttgctcgctctctcaagaagctagcggcagcggcggcgccctggcggcgaaagctgtagtggcggtggctgcaccctcccctccgccagatccagctggaggggaggcggcacgatgggaggccgggcggcgtccgggctgcggaagtagcggcaatgggagtttcctgtcaggagacatttgtcctgatggccacggttaacccaagcaaccataagagataaggtccgagatgatatatatacagctatatacaatactcggtggactataatcctcaaatatcctctcatttttgcaggacgagatagaaaaagataaacatgcaaattgaaattcaacatatcctcaaatatcctctcattcataaaatattaagaaaaagataagatagattattatgttatatatcattctataaacatgcaaattgaaattcaacatatacatgtaggaaaaaaataaatttaactgtgaatagtacttgtgtacactactacataaatactcatctatgcaggatgagaacccctcatcagtaccggttcctcaaccaaaactacaacgttgacactgatgagtgggtggcaccaatgctggtcttggacttggcactcattgtttgttggttttgttatacgatgaatgaatgaattactccttggtcttgatgcaaaaagaaatagggcttagacttttggacggagggagtacttgttgaatggaaaatttgaatgagattattcatgaattaatgatgaaattcatcagtgttttttttttcatccggcttggccggtcgtcttatcatgcattcatgcatgcaaccccttagctttcccagaaaatctcggtttaattcctcgatatatctcaacgatgcgtactttagaagctgttttttagattaacagattaggctttgaaaggaaaacccaagaatggaattaaacatagtctttgccgaaagcgagtcgatctctcatcagtcatcatcaaccacagggacatcacatgttcatcagcttcatattcagtcatgctcttgaaagttgaatcttggactcttaaaaaccaagtatagttcttcagaaaccatgcataccaagtcttccagtttgatccgtcaagaacgctgtcgatcaatcgtgcaggaaacttcgccctaatttaattttctctcgttttgaacggccggcgagatcgatcgatcgagcttggactgggagctattataagtagctcttcatatccagatatacctgcagcaattaacctctagcaagctgatcagttaattaagctgaaacgagctgcaagctaatcaagctctaagagagtgcgacctgcgacgtcggcgattaattaagccggaattactgatgaagatgaagccggcggccgcggtgatgatgatggtggttgtgctgctcgtcgcggcggcgtcgctgcatgccgccggcgccgctgccgtggcgccgccgcgccgcctgcttggagctgatgcatgcgccgccaccgccggcggtgtccgagagcaagccgtcctccggctgcacatatggccctaacttgccacctggtatttgcccgccgaacacgccgtagctaattaaccagctatacacgtacgtacgtcgtcgacgtcgagcatcgcatcgcatacaagcaaaagatttgggctgattaattcattccttcctttgatttgtagctagcgttgattgatatatatatagatcatatgtgcatatatgttactacctgtcatgaatatattggttgtccaaaataaaagttttagttagttattagttagttgctgcatattgttgatgcacgcaacaacgcccaagcatagtacgtggtagtgctggcagtagcttgttgaccttacagactactgtagtattttaatttcttctgtagatttatgtatgccccaggagggtggtttcacgatataaataagagggaaaatgctgatttgtttagtcttcattaattgggttctgttgtgctgtaattaaatgatgattttttttctttcgccacgaattgaattccctggtgatgtttgtctaggtgccgtgtctacatgccccgttcccgtggcatgaatcttgcacaataaagtttggaataattgggatatatgtcaagttttaatcaactattcaaaatagattattaaatacaccgtaacactggatcatggaggagcgtccatatataatttgtgtcatagggatgtcggtttcggctgaatcttgttaataatatcgtgccctagtgtgttgtcgtgtttctgttcttgttatcgatgcgctatcatatataacagggctctagtggacctactctaaaaatacactctttagggggaaaatgtttaggttaaaattacactccgagggagagtagaatttatctaacagtatctctttaaaataatagaatttatgatattcgctttaaagaagctacaaccaattattacaaatgttgtagatcgagactgtcacctataaaatcacaacttaaaacaagagaactacatataactccaacaaaaaatagataagaaaaactttcatctagagttagtgaggaatcgcataaaacaattgtttcgcagaagattacaagttatgtagcatcttcctcaaatcaggaaatcgtatccccgaaattagcgtccgatcatttttccgattgaatttcgctcacatcaccatcgatgactgaaatcgaaccgaaacggaagataccgttggagagaaactcactaatcaatatgtcattcgcatgcagttgccactgtaatagccatcaaagtcgatcca

SEQ ID NO: 52094 - DNA, 1256 bp, Oryza sativa
agacatcgttacgacttgtctgaaaaaatgccccagctagcggtggtgagtcgtttgcacgtcgtccatggcgcgcttcgtcaattggtctctgtgcaaaaaatgttatacgttgatcattcttggatgagatagtactactcaaaagatattcagactgaagatcagttatgctgcctcctgtcctgagtgagtaagagtgcgacacagataaataaagttaattgttcatttataccaacaaattaacagatgaatcagcgcatagctaattaactacatatatacatacattattctgcaacttgctagctctgaaacgatcaattattctacgcgtaaaatttatactattataatttataaacatcagcaattcatcggaagtgtacgtgtagacagtgtagtgatatgtatacatatcaatcacggcatttttggtggcgcgcagggacgtccagaaatatgggggtcgttgctgcagccagaaggccctgacgacgccttgctgacggacaccagcggaggcggctgctgacggcggccgccgccatcctctccgagacggcgcgccgccgcgaccgcgacgccggcgttcagagacgccgcgacgagcagcagaaccagcagcgccgccgcaccttttcctcctccctccatgtcgcaagttcagcctgaaattaagcctcggttcttcgttgctaactaataagcagctagtagctagattgaatgcttgatcaagttggtgtttctatggatgcaaatcaaactgtaggatatgtgggtatttataggtttcagatgagtatgatcgaccaagttgatgatatttttccgcgaaattaactgtgcaatctgacgcagaagacgtttttgacggattaaactggtgtcttattcaatttatcggtgaattttacgcgcattgtgcagatctgtgatgtcctgaaatcaaagttctgctggtttctgtactggactgaagattgatcattgaaaatgaacaaagctgcgacaaaattctttacgtcgcagctttgttcaagttcacctgggtaatggacacatgatcctcttctggaaagacaattggctgcaagaaggttgcgttcgatctattgccccttccatctacgtacgatcatgttccggcccacgtgcgctggcatcggacggtggcagaagcgctgctggatcgcagatggatcagagacatatgtggggcgttgggtatccaggccatcccggactac

SEQ ID NO: 52095 - DNA, 695 bp, Oryza sativa
tggactaggaattgcttagccatgcttagttcaactagcacacattggggatctcatttaaaacctagactataggtttatatgataatgttgctggtgttggttaaataaagtgaaccacatggtgggctgtgggtgcatggttttgctagtcgcacccatggcagttaaggaccggttcgcgggatgccctggaagaatttatcgtacttaccacaagccagcgtgggcaacggctgggcttgtagtgtagctttcctctagccgacgcatccaggcaagggtgggcgtgatggagtttggatgggccctgcgacggtctatgcggcttccggattcacctaggcacgagaggggactgcccgctgccttgcgaggagtgggggtgaaacctgaggtgtggtgtgcttggttagagggggttatgcgaagggtcctgtcacggcctctttccggtatgtcgtggtgacatgtcggcgcacggaaacgtgtcgtggggctgtgtcttgtgggtacagttgtacacctctgatcagagtaaaactattcgaatagccgtgcccgcggttatgggcggtcaaccagattcaccgtgattagtctcaccctagtgtaatctgttgaacttggatagtttaggtggatggttgggcctgtcacaacgtgggttagcgttggacagcggatgttaatac

SEQ ID NO: 52096 - DNA, 520 bp, Oryza sativa
ccatatgtatcgttcacaataaaaaaaaggcaccagttcggtttattataataaaccggcacctacaacttgggggactactggtataggttttcttatgaatcaatgccaatgagtggttatatgtgtccgttcttaattttattctaataaaagatgaaaaaaataatttaggtaaatcggtatccataagattgatctctatacgatgttttgtagtttttatagtggaaacagggtttggacacactcatccgtgataggctttatccttatctttgtcgggccttaacactggacccgccacgaatgaccctcaccggtaatggggctttattgtggccagttaccgatgaccttaacgggcatcaacatgacgggccctacctagggactactggggactaagattctaccgctctcaggttatatttgatgaggctttttgcggcccaacaaagataactatctttgtgacatgccgcttgcctcaatcatggatagcccgattgggatatat

SEQ ID NO: 52097 - DNA, 895 bp, Oryza sativa
tcctgcagcccgacacgggattccccaaatgattaaccgaaaccggcaaacggaaccggcggctctgaacagctcaacacggacgaacgaacgaagcacggggaacacctcattcgaacgaacgagtgaacgactcaacaacggctgtgactaaatcggtgagctagacacgactcacgataaagccccggtatgtcaaacgataggccggtaggaatttaaggatgcacctacggctagacaacttggctaccgagcaacggctaaagcggcggctgggttaaagcggcacatagctgcgacacggcggcactagggcgacttgactcggctaggcagcggcgacttggcggagacacgcggctagggttaggattacggcacagcgacggctaggcggctagcgcagcggcgacgctagggcagcagctaagcgtggcacggcggcggctactcgacgacaaaaacgagagattaaaaactaaaccgagggaacacggatagaagtctcaccgaaccaaaatgatcggagagagagagatgacgatggctacccggcggcaacatacggagacgactactacgctagacagacagcggattaggtcagatcggattaaggccctagggaaaacctcacaggtgaacggcataggagcggcggttgccggcgaaccacggcacaataatgcaaacggagggcaccgggaggtagagaaggcgacggcgatttccggcggcaacacatgaagatgatgacgacactaaggccaaattagattagattggatcaagaccctatggataaactacaccggtgaacgacatcggagagaggaaagctcactgaggggtggcgcgacgatggaagatgacggcagacggccggcagcga

SEQ ID NO: 52098 - DNA, 1672 bp, Oryza sativa
tttgactactcgttttattcaaaaaaaatttgaaattattatttattttatttgtgacatactttattatctacagtattttaagcacaacttttcgttttatatatttgaaaaaaatttaaataagacaaatggtcaaacattgcaaataaaaactcaaaatctattatattgtgggatagagggagtattactctgcctgtctgtcatgctgtgcaagagtcacaaggtctgacgacgatctgtgcaatcttagcagccttgacagatgaccttctgcaattgtttaaacctcccaaccaaaagtttgggaaagcttaattatatattagtgacatgcttatcactactgttatctcttacacctaaatggatcttattgtctacgagtgatgcatcatatttaagcatgcacttgccctaatatatttacatatcctcacaccacaattaatacacatatatttgttctgtcatgactcatgatatgattattgctagtagctattatatgcacacatgcttataaaattaatactgatcacaatgcctcctgccttgcttaaaatcaacctagatggatgatggttccatggaccaagaaggcactaccaccaacaccaaagatcaaaatcatagcccacaggaagaagatgaaaaacaaaaggcaagaaaaagagatcaattcaaattaatcaaaccaatcctgataggttacatgctgcattattggttttttttggggttggtaagggttggtggggcctggatgccatggctgagctaagccagtagctgaggtagatagagggagagaggggagtgtggctaccacacgcctcatgcccttgtcctgctgcttttgctgaggttgatgagaggtgacctgacactgcccatatcatcacggcaagctttggggagaaaagagcaaggctacaaaacaaacggacaagttaggctgacctggagacagatttaaagatgatttggaaatgttcaaagaagagagatggagagattctagttcatattcacctttttttttttgcttgatcccttgtgtggtgatgatggctcgcatgaacattgatgcccactagctgctgtcgtctctccatgcgtttcagacaccggtgtggtatgtttgagcttggggggggggatttttgttgccgttttggctgaatttttataacgggataaattctagatataatgagaggtacaaaatacctcataagtatcggcttatagagaaaaaatggtatcaatactataggtgccagttgaaaaaccggtacccataaaaaccaccgctccgtcctcgagccgagccctctccttatccaccacaccgctctcgcatactatcttatcctctccctaccactctttctctctctctcaacgccacctctcctttcactgcctctcctcctcctccctctctgtccgccgcctctcctccttctcctttgcctcctcctcctcgccacttcctcgccgcctccaagcaccggatctggccgcctggaggttagggcccgctggatccagccttcttcaggtcggggctcgccggatccagccgcctccaacctcatcgccgtagatcaacgcctccagttccaccatgtccacatcgtcatcatctctgatgccgacaccg

SEQ ID NO: 52099 - DNA, 657 bp, Oryza sativa
ctgtacttcgtagcaaagccgctcccagtagacaaccacacgtacatggcgcacatttccgtcgggaaatcaatttaattcctaaatgtacagtacttcaactagtgaaaaaaaagggaaatgcgtaagcgactaaacatgctgctgggcctgtgaaagtcacaactcgaggcggcggcactgtggattcatttggctttttttcatttttattttcacttgtgtactgttgataggaaataagagaaagcagggatgtgtaataagtagagtcccatctcaattttgtagtactccgtagagtggagaaaggcgtgcgcttactaagctacgaatgcgagatgatgagaattttcaattgtatggggcgcttctttgtctgaaaatataagaatttagtattggttatccaccatcatgacttccacgccttcattactaaaataaataaatctaatatatcacataacatgctagtttcatttatttttggacgaagaaagctgtatacgtgagatgtgagattttcttttatgaatttagcttacatgagttttcatctaagaattttcgccgtatatttaggatacgttcggtatgcacagctgggaaccaagtaactgtccccacgggtaaaacggagtaactagtgcacaa

SEQ ID NO: 52100 - DNA, 4871 bp, Oryza sativa
ggttgggctctgttttttttctccttttttagcagaagtagatgttggtggttatgactgaagattcaacgagtatgtacttaaaaaaaatcatattcttgcaaagcaccacctcctagatgcagcaattatctgtttgtttgcatcccaagccataaaatattttccaaatagaatttctcagaggcagtgatgagaaaaaagaaaccatttcttccatgaagcaggggatctgccctaatttgatattgccatcaaagtaacttgccatgttcctgaagatgatctcctacaaaagatggcaatggaatctttgttggtaggtagggctccttttttttttccttagcagaagtagaatttggtggtggtgactgaagaagattcagagagcgtgtgatcctaactcctaagcatgcaatgatgcacgtgtttggtgagatacataattagtaaagagatgttggttatcacctaactgaagcgggtaatgaccgtcgtgttttgtaattgactgccttgactaggaaatcctgagattatgcgtgatgctcccagctgctgaattttggcttgaaatgttgagacaacctactctgatggatggagcattttgtttgtcttttcagtgcatccattcaacggatttcatcctgactgaaatagttggaccaactaattcaacagcaagcataagtatgaaagtaagggaatggacttcgcaatttatgaggtttatgtctatagatgtctcacaaacaagacacatcttgttttcttggacaaaatggcttgaaacaaatacacatcttgtttcatgcagaagcagaaactacctaagcataccctgaactgagaaataattttccttacaagcaaatcatcaatttacatactaactctcatactaactctcagttacattagatccttgcattgctaatgaattcataattttgtaaccaatcaattttcagaattattatcaggttgaaaaccttagattcatttggatcgggcgatgtcgtcgttctgtcggtgtgtacttcttgaaggctttgtttttaagagtttttcccttgttgaactgctgttctttagttcagtgtgtccggttttcctttaattaaccgtgccgttttgaggtttttggattcggtttttcttataaactagatcaactctcttcttctatagtgaaatagcatgagctccctgcctgttcctcgatttttttttcagaattaacacatgacatttttgtgggttttcagttcaccagcagacaggcctgcatcacttgcgagctaactgaagttcaggttggtaggatacttcattaagattcaaagatatcaacttgacagataaaatggaactccaaacttatctggagcaatacatatcgcacgatttcttacctgaaccccgtgtccaacaactcatagatttggtcaggtctctgatgtgcacagaattgaaaatcaactctcccaaatgtcaaatgacatcactgatcaagactgttcctggttaagcctgatgcacgccgcaaaccaaaatgccatatcctaattaggagttccattggtccaagcaataccagaaagcgacagaaatgtaagccgactagttaatttctatcgagacaatcgaggtaagcataagatatgatttcatctagcaaagtttaaaatcatgatgataataagtattatcatagttttactaggattttaataaggttagagatttggctctggcatttatccctcggagtttatgtttgttgaacgtactaatgagtatatatatggtttcgtttggtggaaaacttttatagtagctgcagttttttttcagaattttaagctctctcaaataattaacaatccagattcttattcatattctgacagtacgtagttatagaagtcaaaagaagttagaaaatccagcttcttaccatctctcttttgtcccctaatcttgagctctcgaaacagggcctaacatactcatgtgatgcatgtaacggcgaaaactgttctcaagcaggccggacgttcacctagctctctgtcattgtgcctccaatgtaccgtcgatgtctgaaaaaagtggtcgactgctagctccgtcaagagacgcgtgcatgtattaattccatgtactcgaaaaaatgaaaacgaaggacgaagaagcgaagcatgttcagatttcttatgggttttaggccttcaccgttttgttgacggcttcttgctcttcaaaagggtcgtatttacgcgcgtcagaactgcataaaaacgcagctgacgtatatatatctggccattcatggccatgcgtggccgattgcccatcgacacgagagatatggatcgatgtaatatatttatcggatcataaataaacactaatatctcgagaggacgttaactcattattatatgccatctaaatgttataaaatataatatacgatatatcgttcttcaaattcgatctttacaagtttaataataataatagatttaactgaaacactttatatttaaatttgttgttttaattgtgaaatataaatttaaacttgcatgttgtgaagtgatatatcatatattaatttatcttgctaaaaaaattttaaggacacgaggaaaaatgaagggaaaccctatctctaggattaaaaagtctctcattagagatgttatcaaaatattggtcgtgattcaatgacgggctaaaaatggccgccacaggtcagccgccatgggggccgtacatcgaggaattaataaacagcaacgtgatcaataattcgttagtcaattaacttgatggtattttccgagtgacagtgcattaatttgtttgtacagttatcgccgtgcagagtcttagtacggactccctccgtcaacaaatggatgtcatgttaaggtccgtgcgtccagtagatcgatcatctaaagctatttatattttggtgctccgtatatggaaaaatgagtgctggtttaatatatttgaaattatcatgagatttaaatttgtcgtagagaaaaacattggatataatataaactttatgagtgaattttcacaaaactgcatatatttgataaagctgttatgtgcattaaagctttgttttgcgaaactatagatttaacacggaacatgaaaaattttgaatttagttacaaggttgatccttgtcttatgttcagttttttttttttagttttgtagtatataaaactgccactaaatttagttttgccataacatggttataggatctgcattggtgcagagtatatcatagagtaaatttggcaaactacatatccttatcaaactattccataactacgtatttaagtcggtgtgtcataaatcaatatttttataataaatttaatattaaatttatagttttgtgatacaacgtattaaatcagtagtatcatgattgtttggtcaaaatatctataatattattctattctatcttcgttattaagtttcatgaagaaaattgactaaaagagcaaaatattttaatcattcctctgaggctctcaccatgtaggctccccgaggccaaagcattttgagccgcaacaaaccaacagttaagttttaatagtggaaaaggcaagtccttgactccttgtgcttatgatctcttctggacctttgttcagtttatgtggcttccggttcacccaaaagcccattttttaggttaaactccaagaagcaaaagatgtctttattaatgatattttacttcgacactatattgatcgagcttggcttagatacagtaaaaaaattgctccacctccatatatgctccgtccatgcctagagacatgaaatcgacatggaccacattttttaaagttgtatgagtataaacaaaatgagcatacgtctagtacgtcgacacatgcatggttttatatataaaaacagttgactccaattaaatcacataattatatataaaatggtgttctttcattacaagtaaaatcctcaaaagttgtttccaaatttcatgtttcattactacctacttcctccgtttcacaatgtaagccattctatcatttcccacatttatattaatgttaatgaatttagatagatatatatgtctagattcattaacatcaatatgaatatgtaaaatgttagaatgacttacattgtgaaacgaagggagtaatttgaaaagaaaatcgaaatgtcgctaccacaaatgaaagacttatcaccaccgccactgctataacgatgttcatgatccaattagactctcctaccgctatctctatcatcttatttacgtcaatttaccgcgtggatacacttgagccaacttttagaggtaaaaaagacccatttgcattagattacaattacattagatcagactttaatttgcagtgctaattaatcaggcaaatctttccatgaccccacaaattaagtctgactttccccccatccacggctatatatggcgcgaaatcaatcaaacccgccgcctccaaagcagaaaggaaaccccgcgaaaggaaaagcctcacaaattaagctggaagccaacaaggagaaggcgacgacggcggcggcgagcgatcgcaaggttatggccggcggcgcgagcctcctgcacgcggtggcggcgctgatgagcacgtgcacgcgccggctgcagcgcgcggcgaggcgggtgtcgtccgccgccgcgggggcggggaagcagggggcgtcgtcccgcgccgtggtgccgtggaggaaggcgctgtcgctgcccgccgcggcgacggcgaaggtgaaggcgg

SEQ ID NO: 52101 - DNA, 981 bp, Oryza sativa
ttaaacaaaatatggttgtgtgcgtcctggttagcaccaaaggtaaatatactactattaaaagatagtagtggtgctggtggtgagtctgccgccaacaccatcactaacatgtgggccatgatattaggattttgggagtcatttgtagtatatagattgcaaatctttaattttctaagcatgatattttttttatgaaaggttgtgtttcaaccaattaaaaatatatatttttcaacaaggacttaattttgctattttcaatactccgttgcaacgcacgggtttttggctagttattgaaaaatgagcaaaatcatgctactgtttttatcaggactcccttttcactttttccttcttcattctagccttcataaatccagaaacgttgcgaagaacagccggctgctaagtaggagaaaagctaaagaccgatcactctttcatcgcaagttaggcagagcagcagatatgaactttaagcacatgtttgccaaaagcaagtcaaactattcacggtacggccgtatgtgccgaaatctgctttcaaagatcggaggccagtgcccttgccactcgatacctttttcattttctttcaataatcatcttatggtgcgctaatcatataggcagccgtaaatcaacagcgtcgtatatttaaatatacaacatcatatggaagaagtaacaaaaattctcaagactaatgtatatatatataccaatcatacaacctatatatataccacactcaattcacacgtcagatataaaaaaataaattcagcgtatgaatagtaacatattgttcatgtccgaatttatctttttatttctcactgtgtaggttgaatttaaactttatttttgtgaactgatagatatataccattatactctatattttagatttttttaagttttttttcataactgtttgcattaaatttgaaagaaaaaggtatacgaggg

SEQ ID NO: 52102 - DNA, 723 bp, Oryza sativa
actcccttgcattaattatgcatctccggcgtggcttgctgagtactgtggttgtactcattcttgctctatctttctcccccctttcagtaagagaagctttggagaagaagtcttaggtggagtcttggcttataccccagttgagcgcctgtaaagatggagccgtaggccgctagtccgctgctgtttatttttgattgtcaggcctgaagcgcctttgtaataatgtaaatattatcgatgtaataaagatgtgtcttttatatcatgtttgtatggtgtaccccggcttttcctgggacggggattaatacactagcgttcgggaaaaggcaattttcccggtcgcgacactatttatggcaaaacggtgaagggcaagcaaggctccgctacaatggaccatgcgtggggtgaaggtcaagcaagaggcttggcgccgatggaccgaatccggtggtgaagggcgagtgaaggctttgtcatgatggtcgtggtggaccgtgcgaggccatttgaagctatgagtaatccgtatcaattataagaagaccgcaagatggaatgccgaggatcaagaggatttggttcttcgatgaacatcaagtcaaaatccaaagtgggcattgatcaaagcaaaggtataatttatttgggactaatatgcttaatgagtgtaggtgagaatagtcccaatagcgaaatggaattgacgttgac

SEQ ID NO: 52103 - DNA, 2481 bp, Oryza sativa
agggatctttttagggttttcctttttataaagccattttaactttgtttatttcttcttaaatattatttgtgctctgaaaattccactaaaatttatttacgcattttaggtttttaggaaatataaaaaaaatcctccaagccttatttgacttttaactttgcacattttaattgttggaggctttcacaaggattttaattattctaggcataatttcaaggatgtattttagagtcgttttgggacgcgacaaaaatgattttagcctctaaatctagatgctaagatcttgtttttgcttttaaagtgtgtttatgtcaaaatgtatctgaaaaggtttttgcaaataatccttttgacaagccactagagttggtcatttcaaatctttttggtatttatatctattttatatgataaatgatttgaaattatttgatctcaaaattcacatgaaaatttatattgaccatatttggtcctattatagcatcgagtgagtttagccactagaaccatatattgtgatttatattggttcatggacgtatttcaaactcataaaaatcaaattgtctccaaaacatctcattttgctcaaaattgcatttgggtcattttgttggaacttcaactttttatctttcttcgagcaaggaattaaacatgaatcctttaaaagtgattttattgatgctaggtcaattgtgaacgaacatatggtgatcctcaaacaaatccctcacacgagcaccatggattttgatggttttccaaaaactcggtttttacctttggttttccaagttctttaaatttggtgatgaaatattaaatattttggttatttcttgtttcatctgatttcccatgttgttgtgagctcgtggttcaaatttcgtgaaattccgagtttgtttgggtgattttgagcaaaatcttgaaagttctcgcgtgctgattttgtctgctaggaagttccagacaaagtacaaggaacttccggtcaggactctctgtggagacaaagagggccgataggaacttccggacaaattggtaggaagttccggtccaacttgcctcaaaacattgttttaaaatatgggtttaaccttaaagtttgttttggcccaaaaacgttagctcaagcttccaaaatttaaaagttcaaaagtttagatgacatgttttctaaaagggtttcctttgggtaaaaattcaaaaatttttattggacggttccaaaatttgtgaaaaatgtttcaaagggcttcatcttttatctcaaatgttctaaaaagcttttggagtgaatttttgtttttggacaaaatgtcatttatccaacatgttgttttgatcatatttggtctatatttgcatatgggggggttaaaccatttgattaatgttctttgtgaacatgggctcaattgggtatttctaacccatcttaagtctttccaaatgtcaaacttcataaaaaatcttttggttgaaattcattgttttaaaagtcattctctttatcgaaaactcatttagtgaaattaattttggagaagtttctctcaagttcaaagatcttttttgcaagcttgaattatttcagactttttctctcttttctcaacttgtagaaattttcagtaaaacttgactttgagctaatttgtgatctttatatctcaaaatgggttgtgttgttgtgatttggaaagagcttacattgtgactttcgattctctatagttggacttcactgccaaattttgtctaaattatcaaaggtcatttgaatgtcatttcaatgctctttctaagttattttttgagtttccgaaatttgaacatcttcaaattttcagctttcttaattcttttgatccttgtacatgcatgttggttgagacatgggcaatgctcccgcaatgaaaattgtgcattatcgtgtaatctatctccaaggtttgttgtagatttttcagcccatggattggattaccttcatgtatgaaccgaaagtttcggtctactaaggacttgtatgctccaatggtaaatcttttacatcatctctacatatacaagcttcaagtgtcatgaatattctttcttatggttgattgccatctattatcttgtggcaatttacatgcattattactacccaatgtttggcacatgtatattcttgcaaatcatttatgtgcaaattgttgaaattatagggtgtactcctcatttcttttcattagacaagtgcatgcttctatcaagtaattcaagcttgcatgcactatttagggggagcatgtcctatgttttgtatttttttagactaacttcttgttaagtgtattttatgtttagtctcatgagaagtgaaccattctcaaaggtatgctattcacaagtggtaattcaattaacttttcatcttatattttatctagctaccgggctgcagga

SEQ ID NO: 52104 - DNA, 4322 bp, Oryza sativa
atgcattaaatttatccttatatgcacaccttgaggggaagtttattctataccttggaagactaatggtttaaattgagtttattctttggtctcatgttggaagtggatgactcccaaggtagacttcattattgcttctatggattttctttgcaaccttgatttcataatataggatggattcttttgttccttcatttcttttgtgaaagtgcataaagatttcttttcactctttgctatgcacgtatttagaaggagttcatcctatgttgtgatgtttcataagtcttgatatgtctcttcatcatcactacttattgggttttggcttatgagacatttcattcgggcatacatgacttgtctatagcattatatgcccgacatactttttgccctcctttaagtgagttttgggagatgcattaaagagaaaatattttttttggaattatgcttttgtgcctttctccaaattaagcgagtttaactaatcaatgtatttgctatatgtgcatatgggttcttaccaattgtgactataatcaaggcctatctcttttgattggtattcttctattaattggtgtggttcataagcacaaaacaaaaaagtgcttgctttggattggtgtttctttggactccaactctttctattggaatttcgatgagttcaattgctttattcggtgttggtgcacatgtttttcttgtatacgtgtgtacctcgaggctatttgtactttgctatattgaaactaacgcttttgatagagtttcatcttgttgtagcctctttggaaaaccaaaggtatgttaaaccatttttccttcaagtgtataggacttgtgtagttcttatatacttgatgatttctttttctttatgctcccacccaaacattcaatcttttggtgtttgatgccaaagggggagaagtataaagagagagatataaaggggaaagtgtatactcgtttcatatgttgatgaaaccaaccctctagtatatgtttcatgctaatggtaacatatactagagtattctctttaaattcctattttgtgatagtgttgtcatcaatcaccgaaaagggggagattaaaagatctatgtactagaattgccttgtaaggggagattggaatatctatgatcctaagagtgcggtgattgttttggtgattaatgacaacccattgttggaactaactatttccatgagttggtgagattaggttaagttccgccatcaagttaaaagattgaagttagaagatggacattataccttgatgaggagcaagtgaagacattgatgatgcggggtatgaaatggctatctatggcaaaccggtgaagaaaaagaaaggctcggctagaagatggacattataccttaatgaggaataagtgaagacattgatgatgcggagtatgaagtggctatttatggcaaaacggtgaagggcaagcaaggctcggctacaatggaccatgcgtggggtgaagggcaagcaagaggcttggcaccgattcaccgaatccggtggtgaaggacgagtgaaggctttgtcatgatggtcatgatggactgtgcgaggccatttgaagctatgagtaatccgtatcaattataagccgcaagatggaatgccgaggatcaagaggatgtggttcttcgatgaacatcaagtcaaaatccaaagtgggcattgatcaaagcaaaggtataatttatttgggactaatatgcttaagtgtaggtgagaatagtcccaatagcgaaatggcgttgacgttgacaaccctcaaggtgaagcaagaagatgacattcttagtggtgtattagtcccaggttgcttaggagtgggctaggatgcttggagaccccccaaaacaaagcggcaagaagacttggagccgagttagactagtttactttttcgctttgagtttaggaaaaaccgtactattaagaggggttccaagtgtggttctgagataacacaagtgctcttagtggtgtccaagtgttgaaatatttttaggagctgtttttgaaaatggctctactcgggacagagagtcccacctggaggttctgtccggaacttcctggcaccgaggtgaggttgaaaaatttcataagtgctgcccagatgttcctggcacttttacccggaagctcctggcaggtttccagttcaaacttgtgagtaacggctagatgacgtcacctagccgttatatatatggatctcgtccccaggtcaccctttggccattccactttagttcttgtgttccctaacttgttctagcatctcccaatgtgattttgcttcctccacccaaatcttgtgtacttcttgagtgagagagtgattttgagggtggtggtgaggattggagaaggttttgaaggctaggatgacttgagcacttggggtatctcgttgggctatcatttgaagcttgttactcttggagggtgacctcctagatggttaggtgtcgcccgcgagtttctaacaaggttgtggattgacccgggcaagtttgtgagggtgctattccacctccgaaaggaaacgaaatactcggtgagtggaatccgaggtgaggtttaggatgtcatcttggtagagcaagcctcacttgtggtgttcttttggtgttcaagttggggatcttagtggtcacttgaaaccaaagagaagtacctaggggtgttggcttgaagaccggagacctcttcctaggccttttcttggtgaggcaaggggttaatcaagacccggctctttggagctcctcaacggagacgtaggattctcggtggagaatccgaacttcggaaaacaaatcatttgtctcctctcactctctttatctttgtgattgtgatgcttatctccttatttgcctagttgtgctatcatgtctcccattgtatgatcacttgtgctatcttgtgtattttcatgtgtattactcttgtttgagacatgttgtacctctctatggtttaggcttccttgtgataagtacgataagtccaaccattgcccatgctggcttgtggtaagtacgataagttcttctagggcataccgcgaaccggtccttaattgccatgggtgcgactagcaaaaccatgcacccacagcccaccattcagtcgcattttagttggataattacgaccatgaagcatggctagatgtctcgagcacgcagctcattctgatactaaaaaggtctaatactgtaattatcccatcaactgagctagtggtaattaagcatggctaagcatataattctagctaggtcacataagtaacatgagctagtcgatttattacccagggttgacaaaggacagatatcaagtaaacatggcacaagcaagcagataggtaatacccggatcccatgtaattagcaagacatgtatgtttatttgcaaatggtcaaacatttataaattgggatcaacatgctcaaggggaatgtgtgacttgccttgcttcttcaaaacaatcttccgaactcttttcctcgcgaccgtggacttccgaaacgacggattctacacgctagcacgcaaaacgaggaaaaactctaataaaaaccaaggaaacagtacataaaaagtaaacaaacatgtagatctcaattttagatgaattttgcaagttgaatggcccaattcggagttcgaatgaattagatatgaattttagaagttttgagccatttaaatgaatttctagaactaaatacaatttattgtgcaattattatttatttttacaaaggaaaaggggactgctgtcgtcagcaaggggtgaggcgcggaccgcgtccacgaaggggcgggccccatacgtcagcgacacaaggggtaccggcccaccgtggaccgagtccacggtggcgaccggccactcggccgcgcacccaatggcccggatcggccgagaccgctcggacggccgagtggcacggccaggcaggaatgcacacaggcggcagcgaccgccaagcccagaccaccggcgacgacgccagcgacgagcggcgacggcatgagaggcggcgaaagagaggatggggaggggatgctcaccaagcggcacggcaccggagagaggcgagatggtgacggcgctcctcgggcttgcggtggaggggttaactggcgccgattttcatggggagagtgggggaaatgggtgcggggtggatgtggtctttcggtagtggattggggaagatgagcgatggacggggtgtgacaa

SEQ ID NO: 52105 - DNA, 757 bp, Oryza sativa
cccatgagcgaatcacacggatttgagggaggaagggagtagggtttcacgggaagagagagagaggtggccgggcggaggaagaagacgacggcggcctggcgcgtgggccccgcgcggccaggcgcgctctcagcgcacgcgcggcgcacgtgcgcgggggggggaggggcggctcgggcaggagaggcccggctgggccgggacacggcccaggaggggaggagggggaggcggcctgggccggacaggccgggaggggagggggggggaaaagaggcagcccgggagagagagggaggaggagggagtgggccgggaggggaagggggcccaagaggagggagagaaggagagggagagaaagagagggaggagagaaggacttcgggctgggcttggcccaaaggaggaagaggaggattatttttagattttctttttattgaactttgataattgttgttgttgtttaataaatatttccggtgctctgaaaattcaagtaaaatttgagggctcattttagaccaaggagaatttaacaaaaattctccgggccacatttgaatttttcttgcacgtattttagtgtttgccaatttcttttcgaattttaattaattctattattccttttaggattcttttggaagatgcggatatgtgatcatgtgtataattgtttactgacaaaggagacctagggtctcgtgtcagaggaactatattctaacctcgagctaataaccaacct

SEQ ID NO: 52106 - DNA, 5360 bp, Oryza sativa
gtctgcagcttaccttttcttttaccaatgacatggttcaagatgttgacaatgcgaaggaagcgtccaaagtcaaggtcaggataatcagactttgggatggcataaatcccaacagacgtgatacttattaataaaaggtcggtataaatattccccttgcaaataatgttggtatttatgggtatccccagagagcgctcacatttactataaacgttaactaaaagatctgtagtttattaggtcaatcgtattaccatgaccattgatcaatcaaagaatttgtattaaaaccaagattaattgtgcaacttctgggatgctcgctcattaggcagaaagatcttaccacagttgattaggtggttcgcattcctatgatattcgatatatatacatatgaattcgtgtaaattaaaatatgccacaaaaagtaacatgggcgctttagttttatttttacaaaattaataattctgaaatcagacatcatagtgatcacagagtttttcctttcttgattcccaatttagaaatttgttaatttaatttcattttttaaattcataattagtaagttgaacttatgtgaactccaaaccatacaactaaaatgtattatttactattttcataattattaaatcataaaagttacaattgggacttcaatcatgaacaatcgataaccgtggctctagaccgagtacaatttcatattttatttacaaattttgaaattattaaatcataagattctttacaattgaaagtataaagcatgtataattatgtacttttaaagattccaacttgaaaatgtataactttcaagaaaatttgatgaccaacatattcatcacaggattacatttttaatatttatgttgttaataactatagcccatgcaacacatgggttagcgaccagtattattaagaatgtgactaggtagtgcacggtagtgctttgtagtataaaggtacacgtgtccagattcataatcaggaattcattcattcggagataaagagagttagactgtattagacgatgttgttgaagttgtcaataaaacaaactcgaccaagacaggttgtacacctaaggttaactttgagcttacaactatatatgctcaacctttgagcttgcaggttaacctcaagttgactactccacaccattatcattgaaaaaccctttaatattatgattaaacactatcaaaattttcagtaagagaaaaacactgccaaaatgtggctaaataaaatatttcagtaaagagagaaaaacattgtcaaaggtgtgtaaataagagttcgtacaacagagacatgatagagacactattgccggattctctgatttggtgagtgatttaaatgctgaaatcatacaaattgaaggttggtgaattatttaagagcaataagctagttggctggatttttaaatataaccaaaagggatgtattccctgctgggaatgaatcgatcattttatataggcacactttagggtccatgcaaatcccaaaagtaagaaaatgataagtaaaacagtgcaaattgcagggataggatttttcagtacacacaattgcagcacgcatgcttatgattcttgtacgaaatggtgtcctttatatgctatttactcgttattttttagctgagctggccatagccaaattccattcatattgaaggagaagtggggttcaaaaatccaagttgtggactcatacagaattgtgtaattagtgccattaattctggaacaattatatatatgcatctgtttttctagccgtgcaaaattattttttaggccgggttaatttctcttcagctgcaattcaccttgattaggagcaaaagtacagtgaagattgcttgagttggggactgtcggcttgagcctgccaagaggtagctaggtaatcgtttgttaggtgctctatcaaaatcatgatatgcaattacctctccacaaagcaacttactagtagcatacataggcttctcaagtgacatgcatattgctagataggtggattagggcatgtacaactttcattagtaagggttcttaacctttccaagtagacaaattcgctgacatggaagagatgagagtataaagtgaaatatcgatgttaagcttaacattggtttagcatcaactgtttttaaaagagaaaatatcgactcttaacctatgtaaaaagaaatttggctacataaggatggggaaaggggaaaaaagagattttttttctgatggacgaatagtggatagtctttattgtcttaacttttgtaagggaaacaaccttcaaaaaatttgtattgcctaaaagttcatgctaagctagctacctttgaacttgtacttatgactcaagatccaaaaaaacaatacttagtttcttaacagtgtagttaatgtttgttttgatttctttaggactaacaaaattaaaaaaaatgaaccagctggcttagtttcttgacagtgcagtattctgaatgtgacataacataactaagagtctattttctttcccccttcaaaaatgggcccatatgaaatccgattaggacttaattctccaaattaagtgtaagccagcataactgaattactgattaatcagtcacaattttcgctgtcagctatatatagttgcaggctgtgcaacaaagtacaagaggggtcaagatgagtcagacattgcctctagtcccccacactgatgttgatacactcaaaagtccatctcttgcatcgcatgcatgcatgatcattgatgcatagctgtggctgtccactggttgcagacgatctctatttgatctctcctaagcttaattaattgagcagctaacttttgcagcttctaaacctttatgtgtgttccaacaccaaatgatgcatattcatggtcatgcactaattaacctcagaattgaaggaccgcctatttgtaacttttaagggctataatgctcaaagatggctctgtattactgtatatatgcctccttccacagaagagtgatgtaatttctgtcgcaatattattaataaaattcaataataaaattatagtttgtaaaagaaatttttgaaggaaataataacttatctatatataaaaaatcaccattccaggtgtcaatcaaaatatctacaaagatagttataccaaaagcatattaaactataggtatatcaatttttctgtgaaaaaaaacaaatgcatataaatcacttttcagatgccaatattaatatttacaaagatagttatatccaatgtttacagtttcttttactatagttatctcaatacgtcattgctttctgtgggtgaggtcatatctatcgactttatcagaaggtgaagtatacattaatatatgtgtaatatctccattgatctagtagtacgcatatatatgcatgaaagttaaccaaatctaaaatgtagctagacattaaccttttgggtgatttggatcaattcaagcatgtgtggttaggtgaaactacctagctttgggccttttgcacatttgatatatactccctccatttcaaaatgtttgacaccgttgacttgttagtacgtgtttgaccattcgtcttattcaaaaaatttaagtaattatttattcttttcatatcatttgattcattgttaaatatactttcatgtacacatatagttttacatatttcacaaattattttgaataagacgaacggtcaaacatgtgctaaaaagtcaacggtgtcaaacattttgaaacggagggagtatgtaccctcttgggatctagcagtgcaacgttttgtgagcaaagttaggtttcagctacctagcttattagatgattggcaatggatatggagggagatctcgtcgactaattattgtatggatgatattttggctaacattttcctcgaacttaattactagctcggcctaaaatgtcatggcatgcatgtttgctagcgaattctagagaggaaacaagtcaacaacgttttgcataaggtctactgaattaagataattaagataattaaagacaaacctctactgaatttaggattaattaagaggtactaattcctaagcatgtctgacaaagcaacaaaattcagttaggtactataaattaaaataatcaaatagctagagatgaatatacacttttttttttgcaatggtggtggcaagcatgcatgcttgcttagctatcttaattattagtgccctccaaaagggataaacatgtgtggataattgggcttatggatcttcctttccaacccggctactactgatctcgaccgacctacatgtgtacatatcttgcttaatcaatggagcttttttagcctttagcaactgttgcattatgcatgcttgtgatctccttgattatcttgctgccatccatccatccatccatggccttttgggatatgatgtgcacatgaaaagtttttttgcatcactggctgcatgttcactgttcacatgtgtacacgtacacgcgtgtgtacaaactatatgcgaattgtcaatttgctccttctttattcgtggatccttccatcccattccttcaagagccagtcgctaacgattagcctcatttagagcatgaaattttatcttttattattatagagcaagaatttagtttttttttgtaaaattactgtgaggttctatgttattgtggggtttatgtgaatgagttaagcatttaaaattttttaataataaaaatggttttacatctcctatctctaccaacatgcacaagaaaaaaataaataaaatggttcaaggttatgggatgaattcttatctcccccgataatatccaactgagatatactcgatagaaaacacatttaagcattacattagttataatttatgttagttggtcaatatttatcttcctttttctctacaaataaatttgtagtactgaactcttgatagttgagatatgttgccaagaaagaagaaatggagggagttggaaaagtgaagaaggggagcaagccgccatgatgggggcaagtgtggcgcacaagccggccagaaacaccaacaccacttcagttctcttccctgctttccatgcatggccttgtggcccactcactgacaatgagctcactgcagctagtgacagtccagttgtaacattccggcttagggcttaatagaattaatagaatactcatatcaacaagttacaacttcttttccggaagtcaatcttaaagaactccagggttaagcgtgtttgg

SEQ ID NO: 52107 - DNA, 568 bp, Oryza sativa
ctccctctccccctctacctactcctctcatcgcatcattaaagaatcatcttagcaaaattccacagaggagaagcaatcaagattcagatatcatcacttctttcttgcttgcttgtacgtggtagctaggagcgtgggagattagtgaccatgcatgtctttgtataaatataatactccacttttgattaatgattggccgggtgactcagcttaattatatctacattaatttaatcctcctagttgactgcactagctaggaaacttcattatatcttataataggatcataatcctaattatatatacagcacgtgcgttccaatctatctatctatctattatctatctattattattatatactaaaaatccattaaactttctacaaaagctcctaagccgagcgctatgtctgggtgtgtgtgagtgtgatgcattggagacaatacagggttatttaactctcctttgtcctttccaccgtgcgttgccagaaactgggtcattcaacgtccaagtccaagacattgactattggtcaacattggtgactccgtga

SEQ ID NO: 52108 - DNA, 737 bp, Oryza sativa
ctgcagccctgtaattagacttagtatgtaattattgactacggaagttgtgcgacaagtagcaattgactattgtagtcttaattagacttagcatatacgcacgaaacacttagcatacatgactcttttagtcttagcatgtaatattatttgaatatatatataagattactttatttgtaatagacttagtatataattattgactacggaagtggtgcgacaagtagcaattgactattgtagtcttaattacacttagcatatacgcacgaaacacttagcagacatgactattttagtcttagcatgtaattttatttgagttttaatataagattactttatttgagattagacttagtatataattatttactacggaaatggtgcgacaagtagcaattgactattgtagtcttaattagacttagcatatacgcacgaaacacttagcatacatgactcttttagtcttagcatgtaatattatttgaatatatatataagattactttatttgtaattagacttagtatataattatttactagctagggttgtataatatacgtcacctagacttagcttatatcacgatttgtaattagacttagcacgtaagtttgtgtagggttctaatgtacgacatttacacttagcatacatgacttagattgtaaaacataaatgtctcgtgacttagcagatgtttcttgtatcaacagatggct

SEQ ID NO: 52109 - DNA, 3140 bp, Oryza sativa
acgccatcgccgtgcctctacgtcgtctgtggctatgtgtctagtggtgggtttatcaatgcagggcccctccgggaacgggggctgattttgccccgcatgtatactcggggcctggggcggaagaatagttcccgggtcgggggcggggccgttccagcccaacccgcacccgacccgccccgttgccatccgtagctgctatagcggtagtggaccaagtagcggactgaagatagtatgttgtaacttagcgcccgctatagcagcctgttatagtccttcgcgatcgctataacagcccactattgactttgttggactgttataatgcttgaatgttgttcttcatatatggattgtagaactttacattgtgtatcttatatttatcttatacatctatatgttatttcatattttttatgttatgaaatataggagtagttaacaatgtcttataaattgtaatttttacataaaacttgatgttaatattgatatataatctaaatttatggttatttttctatatttgctattggaacttagcgcccacaatagcggccgctatccgtaatccgctacacaagtactaatctactaacaacccgctgctaacaacctgctatacactatttattaccttgattatattcggtaagttgttttcttaaaagctgggtaaacacatacgtgcagcgatttgtgattgtatgtaggaaccgtgtgagtaacctgctggactgctggaggataatctgttagactgctagagcgtggtgaaatgtgatgatagaatgcagaggaggcagattaaatggagccatcagccattgagagatttgatttagtggagatgacggacgcgtagccaagatggatgctttgtagatgcatatattgatagttgcatgaagattttgagatcaattttatttcctttaatttcggttaaatttggctatcatttttgtgggaccgacttgatttcctaaagactaaggcaaccggtatatatactggtgatggccgattggaaaagaactcctgaacaacttatcaattactatttcttattcttttctttctagttattctctatttttttttatagctgagttctactaaccttataatttggttaatttttgccattttacgttgaaaaacagtcgtacttctcaacaaaacaaaagcgaggaggttatcctttgcaagtttgcatggaaactggacgttcgtcgtcacataaatacgatatttatcttcttcgctagtagtttgtttgtaaattagtcatgtgattctatgaaattgaattaattttgaaatcggctctgatctatcgattttgatgactccattgattataccgtaaatcgttaagtgatcatgtgttggtcatgaaaaagcgtcaataattttaatagaaatgtaagtataaaataaaggattaagaaaagaagaatagtcatttaaatagacaaaaaaacacacatatagattggataagaaagatggactcaaagggagatttctaagaggatgaagatcttactaagttttctcctaacttctattggatcgtccatttcatatgaatttgctttgtatgattcaattatttgcttcaaaggcttttctatgaatttttcttaaaatattggaatgcttgaagtttcttatatttttcaatgaatcaaagtgggcctatgaaaaaactggatattttggtggtagggtttgggggtgaggggaatccgatgacattgatatcaaacatatatatcatttaattgcgtcataggatttgaagctgagaagtctatgtctacttaaaagagagttgttctccacccatctcttccccacttcctcctaaaaatgcttctcccatacaaaccgatttgtcaaaaaaaaacacgatcatggaataaaaaaccaatcaacccacactgtccaaatcattccactaaattgaataaagaaatcgtggcaatatacgggcctataactagtcttaggaaaaaaacatggtttgttcgtttggtacactgactagttaacataattaacacagtccattattaaaagaaaaatgagtaaattttacaaaacttcaaatacattaacaaaactatcgcaaaactgcatatttaaatgatgcatcaatttaaccctaaatttatcatagaactacatagttaaggtgggttatcgcaaaactgaaggtttagttacaaagttatcacaaaagtacagttttagtgtcaatttaatcataaaacttggatgtttataactcaaccataacattagtactaaggatttaaacccaaagtccaaagtctatagttttgtgataattatattactgtattaaggaaaaagtacgaattaccccactgaactatggtggtcgaccgaattactctctaaacttgaaaaccagacattcctcactctgaactgtcaataccggactaattacccctctcgactgaatctagagtggttttatcttacgtggtgtacatgtggcaatccagtcagcattttatttttttaaaaatagtgggacccacttgtcataccttatcttcccctctccctcttccttttcatctctctcgggctcagagtgtgcacggcgagcagcggcgcgctggggctgggcggtcgacgctctggggctagcgatgggcggcgctctctatctctctctctcggctcaggcaggcggccagcgatgagtcctcctcgggagggcgcggcgagcggcgcgcgtggcgcggagggcatggtgggcagtgccgaggagggcatgggaggtggtgcgctacggcgacgaggtcgccgcccatccacgtcggcccatcgaccgtcgtcgccgtcaatcggagccacacagccgcgccaacgatttcccttccccggccgtcgcgcccgccgctcaagacgccacctgattcttctggctttgctgctgctcctgtaaaactaccccgtcacaccggtagcaagcagcacacatctgtacaacttgtacatgcatgtacaccgttcgtcgattcaatttctctcagaattcttccgtgacattgccacgtgagattgcgtcatggccgcgagtagtg

SEQ ID NO: 52110 - DNA, 2279 bp, Oryza sativa
tcatgttagatggatctccctccgcttgagcccaacggctcaagggggccttgacccgcgccctgatcgggggtgcccaacccaatagctggtgggcccccgtcacactgtgccatataaaaggggtggaggccgaggcggcacatggtacgaggtttgtcaccaccgccactctaccgcacaaaccctaaccgatcgagagggggcgtagccagtgacgagaaacgtcgccgccgtccacgtcaagcccgcgaccgacaacgacgatggccggcgcttcttcatcctccgacacctcaacttgtcgattcctctaaacccttctcccttatgttctattgttcaaacacccaaatagagccaacccgactagatctaacctaggttatcctagagcaaagtctaacaatggtattagagcaacctagccaattagatcggttcggggaaagaaatccaaagaaagaaaagcacaagatccgcacggatcaaaagaaccgaaaaccctaaccctaattcttacctcatcgtcgttcgtcgtcgacgccagcaacggaggggggaggggcacagggcaccgtcgaggagcccctccacggtcgtgcacgcgcgtgccggcgagggggcccgcggcggcgccgccatctccgttgtcgccgttctctctctcacttcacgcgggtggagggcgagagacggtggggggagaagagaagagaagagaaaagcacgccggccatggcgcggcggcgcgaaggttgccggcgacgacgacgccgctctgtgtggtcgtgcgagagagaagagaagagaggctagctagggttcggccggccggcggctggggtcgaagttttgtccctccgatctcggcgcccggccgtccgacctaaaccctagccgatcggacggccggcggcggccgggccgaatatggcccaagagggcgcgcgcgggaggcggctttccaggtccaagcccaggttgcggccttggggaaggggaggggggcgcgccggcaaaagttcaaattaggtccctcgggggccgaaaatgatgaaaagaggacaatagcaattttttttattttgtcaatttttcatgcaaatttcaatagaattttgaatagatttttgcatgttttacctctgtttaaatttgaaccaacgggagaacttttacagagaataaataacatacttttgctactgttcatatgaattttatatagtttttccactgcaaatagatgaaattgatgaaaattagtgtttctaaaattaaatttcgaaccaacgggagaatttaattttaggaacattaattatgtgctatgatgttgtaattttctgaccaacgttgataattgcaatgttatagttatggctatgtgtgatgtctaattctgcccaacggtgatgtaggcttaatgcatactactttaatgttaattttgttctcatagtacatgattatttcaggtggctactccttgatgggttgcattaaagatattccgaccctgaaaggagataactacgcagaatagaaaagaaaaactcgaccttgcttttatcttgggagaggtggactgggtgttgactatcccatgtcctatagaacctgctgcacttgtcagaggtgaaaatgagtcagatgctgactgggaaaagagacagagggacaatgctcttctcatcatgtcgtatgacattgaacataagaaatggttcttagccaacaagaaatgtttggctgtggtaaagaacacgattgagccaaccatattgggctcaatcccagagtgtgacgctgtctcagagtacctcaaaagaataaagagtcagtttactggctcttcaaagacttatgctacatagctgataaagcagcttgtgacagagaggtaccatggaggtggtgttagagaccacattcttaggatgagcaatatggcttccaagttgaagccaatggatttgggcttaacagatgacttcttggtccatttggttatggcctcattgccaaagcagtttgacaattttattgtcaactacaacataagtccagagaaatggaactttgaaaagctcatcgctaattgtgtgcaagaggaggagagaatcaaagagtcaaatggtggttcaattaactatgttaaagataacaagaaaaagaaccacaagtctcccacctcaaaagctaaatagtctcagcatctgcctcagcaacaacagttcactgttgagaaagatcagtgtctcccctgcaagaag

SEQ ID NO: 52111 - DNA, 1601 bp, Oryza sativa
cagaggctagcaaatgattccaaaaatctgataggtaatgctgaaagcttagaacatccagaaagattcaagaaacggagtttggtcagattttcaagagattcaggaaaactagtaacttcagggcagcatgacaagtttaggtaatgtagatcatgcaacaaatgaaggctattcaatcgttgaagtttctggcaaccttggagattcaaataattcagcccttttaagttgcttataaagggtggcaactctgtaagttcagtttctgaaagatccaacatttgtaacttatgaaagctactaatttgcagagggagtgctgtaatagataaagatgaaacgtcgaggtatctcagttgtttcagctgaaagataggagatggaatatcttgaacacagcatccactgagatccaaaacacgcaagtatttgttcactgaaagaacttcactgacatgctcaaagtctgcaccactattcttgaaaattagtgaccttgccttggaaggccatgccttgcgatcgattgactctaaactagaagcagacacctgtgcataacggtaatcacaatatctggcattgcgctcattctcagcatctaaaataacaaggatatcttcaccagcaactgatctagcaagatcatgcgccaagttatgcatgtgaagcatttcctcagaagcaccagatctttctgcatcattctgcggaggaaaacagtgttacttgtttgttgagatatccctatatggccattctatcatggtcaatcttcttacggaaacttgttgagaattcagaaataaaacaatggtataagctactatgcttaatggagatatttaaccacattctagttacataggatatgtacaggagaaggtaaaaaagaacccatgaacttacctgagacctctctaaaacttgaaggaaatagattgctttaagttcatcaatatatttctccgcagttacatcaagtggcaaggttccatgtttggactcaatgaaagaccaagaacagctatagaggggggggggggggtgaatatagcaattcaaatcttacccccgaaaatactcatcaagccggatttctcaaaatccttactagaaccgcagctattagagaagccggatctagaaaagaagagagaaaaagaagagagaaggaattcccgaaactagaggaggaagagaaaatgaattcccgaaactagaagagaggtgaggaagagagagcaaaactcatcatcgcaaagttcaaattgcaagcggaatttaaattgcggaatttaaatggacaaggcaaaaatgaaatccttcaaatcatttcatttataggtgatgcaaaataaccgctcaactaggagcaaacatacaccttcagaggaacattaacacaaacttaaaatctctcggacaaacacactcaaactaatcctaatacaaaagcctctcgggcaaacacactccaaactcaaactgaaactctctcaccgagcatctcaaaaggattgccaaagaagcaacctccacccttgcatccatctctctatttataggctaagacccataagacattgtctcaaata

SEQ ID NO: 52112 - DNA, 616 bp, Oryza sativa
gcggcgtgcaggcgcaccgccggtggcgtgtggtgcggcggcggcgtggcggcgcggcgccggtgccgtgccacggtggcgtcgtggcgtctcgtggcgcggcgtcgtcgtggcgcggcgtcgtgtcctgatgaggtcggcgtcggcgtctgaaactcggcgtccggcggcaaccgagggggagagagagatatcgagatcgaagagagagatcgagggaggcggcggcggctctcaccccagagatgcggcggcggcggaggagatggaggcggcggtgacgacgacgagcgcgagacgacggcaagatacggcggcggcggcggcgcggggatgccctaggcagtggcggcgaaggagaagccgagagagatcgatcgggcaaaaacttctaagtgttggtggagaagacgagggcgcgcatcgggaatatatatacccctagatctttactcccggttgtggactaaagatcttttcctgctatttctaaattgtttttaaacccggttagggttaagaaccgggactactgataagcgcactgaatattattttccattacatatgtgtttctacaatagaagataatgcattacaattatttaaagtacaa

SEQ ID NO: 52113 - DNA, 2213 bp, Oryza sativa
ctaaatgatctacatatttgtgttcatttattgagtctattcgttatttgtgcattggagtaaatggacattgatgcatgtatccatacacacaagtatttataacctacatgcaatatcttgatttgctattggttaggaaatattggggatggtgtatgcatctagtttattgctagagtaaatatagtatgagagagttattagcttttcttggtcttggtgtacctatgaaatatgtagataaatatggaatggagggagtatacagtagtgatcaaacttcttgatttatgaacagagaataagtaatgaagtagaaataaacttattttggcacaagttttaaccaaaaaaatcagttttattttggggtagaggaactacatactatggtgtgaataatttttgtttctattactatcgatctactcccaccatcctaaaatttaagcatttttagtatagtgacaagtcaaacatttttaacttatactattaataacaagaaaataaaaaaagatcaatcatgtaaaattgattagtagatttatcattaaacaaaactatcataatatgcatctctttctattaaaacatcttatttttatagatattgttggtcaaagtaacatctcagagaccgtgtcagagtccaaaaatacttatattttgggacggatggagtacatgatccaacacgatctgagagcttagattttaatttctttttcctccaaacgtagtaatttctataccttcagagtgaaggtgatttatcttttcaagctagctttactgtacagttaactatgtaaacaaacaaattaattaattaattacctataacattgtaaggtgtttaatttttttgtaagtaaaaagtttttttttaactttgatcaagtgtgaaaaaaataatcaacacaataacaagtaaatatactatcatgacatacctcattgtggattttagagaagattgactcagcacaaagctatctgaacggattgagtattgaaaatttgaaaaccggatgtgaacaagtattttaagaaacatagaaatttgtttgaaaaaatcacgacgttttatgagctttagaagcgtgcatgtaacaatctgttagctagtatagcactttcaaaggaagcctttttcaacaggttgagctgtcgctgagactaaatagctctgtgatttcgtcgtgaacataaatggaccacgtcacaatttaaatgtcaagcgacttgcaggtaacagatcatcaaattcgatctttcgatggttcagtcttggtgaaatttcatatgggtgtatccaggtatttttctcctattaaatcctttcacttgcagtataatctttttttctcctattaacacattctgactttgcatgcatgaccatcattatgtagaaagcgttgcgttgttgacctgtaaatatatgccacttcttgttgacttgttgggccttagaagaaaattgctggatcaaagctggctgctggtggtggtgaatataatgaaatggaaatcgtcagttgatccaattgttttggtcaggcgattgtataatatgctcttttgatattaatcttccacatggctagttaagggcttcttatatatatttactaccagttgatactccgtgttttggtgtgacatgtagataaatgcatgttatacattatagaaatagaaatggtacatgtgtatgttaaaataatatgaaaatgatatggagataatgatttgacattgctttcataaagttctacaaatacaacaaaattgtaaatgatatgatatatttgtatgatatttaaaatactctagataataattgctagtgggtaatgatgtgacacacttgcatgttgagttttagaaattagtggacatcaactttgtactaagataagatacgatataatgttgactatacaatattattggagtatgtagttttctcggaatatgttatgacatatgaccatatactatgttaatggtgtatgatattaatggtgtaggaatgtcaaaagcacaaaaaaaaaagtacttgcataaacatggatgacaacaacaagcatatattctgatttggagtcacaagaaaatactcctccatccaatcaaaaatattttttgggaattgctaaacaactacctactgaaattttttgttttgtcagctgagttcg

SEQ ID NO: 52114 - DNA, 3128 bp, Oryza sativa
tggaggggaaggggaggatgggcaggagagaggaggaggtggaggagaggggacgaggaaggggggaggtggacgggatggatcgggatgaggaaggatcgatctgatttaaactgtaggaaggggaggaagttcgacctgtggaggagaggataagggatagggattatatactacgcttgaattttagttccggttggtgtttccaaccaggactaaagatcatttaatttttagtcccggttgagaacaaccaaccggaactaaagtggtgacaccaaccgagagtaaatatcctcggccccctgacatcaatctgacaggggatgaaccgagattaaagatgatttttagtcccggttgataacaccaaccgggactaaagatcatagatggctctggggttttcaactgggactaaagatcatttttacttccggtttttttagaaccgggattattgtggttttgggtcgacccagcagagatcatttctccactagtgtatgttagttagactatgaacgaaagctgcagtttagtggtattaatcggtactacaccatgtcaggtgctatcgggctgcaccttgggagttgggatgtgtcaccagggcaagcccatgaagaggggacagatagaaaaggcagtatataaacaacacttagctcggttcccaaaaatacgtaatacgcacgaaaaacggagcggtctatttgcacgtgattaattaagtatttgctaatttttttaaaaaaaatagatcaatatgattttttaaacaactttcgtatagaaactttttaaaaaaacacaccgtttagcagtttgaaaaacgtgcaagtagataacgagagcagagtttgaaaccggctgttaccaatatagccttaggccgagtttagttccaaactttttcttcaaactttcaactttttcatcacatcaaaactttcctacacacacaaactttcaacttttctgtcacatcgttctaatttcaaccaaacttccaattttagcgtgaactaaacacacccttaaaggaaggatgaaagagaaagagcaatgctctggtgctatcagcatctgctgatagtattataaccattaaaaataatccgaattctttgttaataagggtaaattagtaatttactaatacattaatttggggtatgtcatttttatttttgttcccatctcatagttcgttgcatcgctgatatcccataaaaaaaagagagaaagcaaaacgaagcttctgcatgtggatagctagtcctcctgtcgacggtgcttgtggatcgcaattcgcaagtctctcccgccggcggcgtatacactccggcacccctgtcagatgacaagtcccttttagaaaaaaaggattgatagataatactcctttcttattttaatatatgatgtcgttgacttttttactaacgtttgatcattcgtcttatttaattttttttacaaatataaaaatattatgtcatgcttgaagacatttgatgataaatgaagtcaatgtaaaataaatgataagtacataatttttttataagatgaatataaaataaatgataagtacataatttttttataagatgaatagttaaacattgttaaaaattcaacgatgttatacattaaaacacggagggagtaaaaattcaacgatgttatacattaaaacacggagggagtatgagtttgagagctgctttcatttcactgaaccgtcaaatagactgcaagctatttcaatgctgaacaaatccagcatataattaatccagtgtaggggttgggtgtgaaacgtaatccagttccctttcttcattgcaggaggtttacctggtgactccagaagaaaaacggaaatggtaaacccttgccaagtctcccaaattaagcccctgatcttacgtaatggctgtcgctggagctcgtcgacgatagcgtttttgcacattaactaaacatctcagcgatagagtttttgcccctgatcttctatgtatctcagtcgagttggcgagcggcgctttcatgtttgagctgcgagatgagaacccttccgcacctgctagtttagtcactgcaaaataacaattatacccctcctcatatatttttaagaaaatcccctatgtacaattgataattcgtccaatcatttatgtatccctgaattttgcctcatcccttatatacacctgagttttcatttagatctcctctatacccattacgttagttgaccatgagttgaccgttaaatgtttttaagattgactatattacccctctcttatccttatgtgctagtttaatgataaaaacacaattattatatgacaaaaatatctatttgtaaataaacaaagggaatataattatttgacaacaaattttaaaaataaattaaaaaaatttaaattaacttttatggtatacgtatattgttttcatcaaaatttgaacccaacaaataaataattttggttcacaatttatagctaaaactcttatatggattttgtaaaaaaaataaatttgttcaacagtttaagttttcttttcaataaataattatgtcacatttgattttattatgagttacaatttttcacattgtgaattatgaaaaatgggcgatatggtcattttagaaaaatttaacagtcaactcacggtcaactaacagaatagggatagaggagatcaaaatgaaaactcaagaacatgtaggggatgaggcaaattcaggggtatagaagagattgcgaaactttttagggttatgtaggaaattttctctatattttttgaagaaccacaatgccttatcacgtttctactactactaactaaggtggtaatagaaatatatttgaaccatttgatcaaatgagatcaatggttcagatttctttctactattagtagagagcgcaccatactggggccctaacagaaaacaacgacttgccatggtggctcggcgcggcgcggcgcggtgacagcatcctatttcctggcttggaacctgggcgatttcctttcctactctcatggatctttcttccggccccctaccttagcttttagaacct

SEQ ID NO: 52115 - DNA, 593 bp, Oryza sativa
agaaaaattccaggaggaaaaagttgcaagtgaaaacaaaactctcgagagaacatccaaaaaattcaatgaggaaagaaaggcaaaaaagaaataaagagttgaaacccaggaaatttgaggaaagaaggaaagttaagaaaaatgaagaaaattatattgagtgaaagtcattcacaatgaacgaaacaaggaggaaattttattggagttgcagctttttcaaaaaaaatatataacatattttttgtagcatgattgggaatttctaaatacttaaaagatagtgtaaatttcacaaaactacatgtattttcactaaactataacaaaactataaatttaaaatgtcgtatcataaaactgtatatttaacattaaatttatcacaaactacagatctataatcaattatcacaaaactatatatttaatattgaagttatcacaaagttacagatttttagagtttaaatcctaacactattgttatgttatgttagagctataaacatagtttaatgattgaatcggttctaaacctatagttttataataatgttctaactaaatgggtagtgatgcacacatca

SEQ ID NO: 52116 - DNA, 1730 bp, Oryza sativa
atatatagagtttagggtcgtgcaaccaacccttgacgcaatcctaataggtttcaacacgatacatggcccaagggcccaaatacggtgacgtaacaccgggacagattctgaacgtcaaattgtttagtccattcttgttgacttggaaagaatttggatatgggaccagaaccattggaaatgttatcttcttagcttttcatccatataaagaacgccccaatccgagcacgtatgcgacctgcgcgcccattttagtatagactggtcctggactccgaagtgcactcgaaattggcttagtttgggcctccaccttgacttggacgtccttgatgatcctcaactctaagtccttctccaagtgtctccttgttctctctattgttcctaatcacaatataatcattaggtagcaatctattcttaaattcatataaagaagaacataaaaacgagctcacctctaaattcaattgccgcgcgcaagctcttgttatcggtcctcaaatgaccgatggaagattgttgtgtgtatccgaaagagtgatgtccgcatcaggtagttttgttacattccatcttaaatgtgtagttttgtgataaatttaattttaaatctatagttttgtgatagattaagttaaatctatattttttagatagtttggtcatagtataggtagttttgttaaatttactctaattatactactcgtacatgctaaataaaatataaaatagtaccctttaaatatcatataatatttttttatagaaaactttataaaatctataggcgcgccaaccgtgcgtgccgattttctagtccatactagtcgagacgtgttacacgccacttggctgggtcctgctaatgcgcacccgcactcccctccccctacgccgattcctccctcttccccctttctcctccccatcctctcttcctactacagtacaccacaaaaattttttaaaaaaacaaaagttagaaaaaattacggatagaaatactatatataaaaaatttgaatttaaattcaaatttgaattaaattttaattcaaattcaaattcgaattcaaattcaaatttgaatcgggtatgtaaaacttttaacttataaactttgaatctataaactttagatgtataaactttagatgtatagaaatacttgatatagaaaatatttgaattcaaattcaatttgaatcagatataattcaaattcaaatttgaaacgggtatataaactttaggtctataaacttttaggtctataaactttagttgtataaactttagatgtatagaaatactatatatataaaaaatatttgaattcaaattcaaatttgaatcggatatataaacttttggtctctaaactttagatatgtaaacttgaggtgtataaattttaggtgcataaatttactaaaaataggaaagtaatacggtgaaaaaaaaaacaggtagagggagggaggggggaatggggtgatcgctagccaatagccagggtgattgttcgcccattagagtttccgcgcttgactggaccatgtggcgtacgtgatgtcactgataaatccgaaccgacgcgagataaaaaaaaactgaaaaggaaaatctcgaaacgtcgatccaggattgaaagcagatggatcagaggcgacctgaccgttgctagcgacttcaccaaccaccagtccattctc

SEQ ID NO: 52117 - DNA, 530 bp, Oryza sativa
caatacgaactcgcatgtacagctagctatttgagatcaaactgaagaagaaaagaggtagagggtacaagcactagaaggttctagaagctaatgtagggggttagaggtagggaaggaaaacgccaaggctccaagccaggaactaggatgccaccgcctccaacccgtcgttgccaaggctctgttttctattttgtttgatcaatgatcctgtagttggctgaaaccaagagcatgtcaatgttatatcatacaatactataatgtaataggaaattctaatgaataaatcaattcattcattttttccaagtttcattgttttagtctgtttcccaggaaaattagaaaaattcacaataactgccttttgtttgagtctattgtttgagtaagcaataagaattggagccaataaattcccaatgggaaaattcactttttcttgttaaggaaaaaaggcaaataatttctcaaataataaccgttgaaacccgtaactgcctttgttcaatgggaagaagaag

SEQ ID NO: 52118 - DNA, 684 bp, Oryza sativa
ttgacacaacagaatagagagaattgctatttttcattaatctaacaaaaaaaattaaaacatagggtcctcaatgccaacactacaaaagaagattcatcattccagcaaccaggatcagacaaacatactgaacttctcatcaaagaaaaattgaattaaagaatctggttttgtaaggaaaatactttggaagaatgagttcaaatgaaataaaaaataacaaagatcccatgcagtatttatgaagcatgaaggtagtattctacttgagttgtaacagtgaaaagtgccagcactgatagatttacgcttccctctctagtacttatctaaagtcatacaatattattgctagtcctagtatctatgtacaaagatccaatcattttagaggccatgttaaaatggaacactagtcactttttgtcagcagagagaacattatcatcttcaatccaacacatgtaaatttgcacatacaagacttgattgaataaagaatgttcgcattctatatttaacttttattttttatgtatttcagcaaccatttcatggttctaaaactaaaatagctatgaaatcagacttactgtagtcttcgatccaagcacagaagttggatggatgatgttgttctgtgcagagaaggaataaccggacaagtgactagcatcccct

SEQ ID NO: 52119 - DNA, 775 bp, Oryza sativa
cctgcagccctgcgaggaggaaggagtgcggccatgcgggatggggaggtggatggacgaaaaatagtcggaagccttacgtattttataattattaggttagatatagatatattacatctaaactccgaccaatgtctctttaatccttcatattcatatctatcggttatatatccgatcgatccaaattccatcggtatcggttggacacagaatactatatcacccctgtggtcgattggccccgtgatctaatcttctcgtttttaccttgttagttgcaagatcaaactaactagcatgttcctaacccgattttgataggacctatactagagtgaagcaaatatcttaggccttcgtgtgtgcgacaaattttgcgtcaatgaatctcagagcatattcaacggtacgtatatgggtgtattatgcaaccgcttgcacaaaacttgctattagcagaatgcattatgcagtcatgaacttggctttaggactgcataattgcatttattatgaagtaaaactagtgttattccggttattctgcttatgtgctgatgcttcgatgatccttcggtgattttacctagttttctgatgattgttttaaaatttacatcaatattgttattctgcttgtgtgctgagtcccatatgattatttggttttttccccagttttctggtgctttgttttaaaaattgcaacaaattcggtcaagatttgtccgatatttctgaaattcgtccatttcagttgtgccgaaat

SEQ ID NO: 52120 - DNA, 1024 bp, Oryza sativa
caaatgtacaggtgcaaggtatttgtactctctctcaaattaaataatctttggcatggtggcttacccttacccctgattcccacgagacactgcttctccttgccttgggtggttgaaagacagaacagcaattagagcaccaatcatccaatctttattcaacttttattccggaagttttcaaatgattttataaaagaaaagccaagtttctcaaatgattcactcagtctctctaagtgtatcaatatgaattcctcaccatttttttttgccgttttgattcctactctaaggtttgatatatggagctcggaagagatcaaacatagcatacttgcatttacatttattactaagtcaaaaacttagagtaaaatagatgactaaacatactcaagatcaagatcgtgcaaagtgtgtgatatatggtgaaagtcgaatatgaagaaaaagtaaagaaaatgcttctcctttgtgcttacttccttctcccaaaaatccttcttttattaataaggagagggcatggctttttccttctttttttctttatcatgcttatgcttgagagagcataactttatatattttttttcataaccatgcctttccctcccttcttctttctcttcttgttttttcaaaaaggattttctttttaggagaagaaagcgcataaaagcatggagaatttattttggtggtagtatggaaatggaatggataattgctagctcccagtgtaggagtttagcatgtgcatatacgtgggtgtatgatcttgatcatagagcatgagaagtatgtacacaagtcacaaaaatttgacaaagttcaatggaatagcaagtaaccaaaatgtatatggtttacatcaatgatgtcacatttttggctctggtaggaatttatatcacatgagatactttcaaatttaaaattttgaaaaacagaatatccggaattcaagtcaaacgaggactagaatcatagcaactcttatttaccatctcatatc

SEQ ID NO: 52121 - DNA, 956 bp, Oryza sativa
gtggtccatcactgttgtgtatgggcctcaattggaagccgataaaattgcctttctctctgaactcgaaagcttacaaccctccatgaaacgggcttggttgattattggtgattttaacctcatctataaagcttcagataaaaacaaatgaccgcctcaatagaagaatgatgcagcatttccgtggcctcttagacaaaatccgggtgaaggaattgaatcttcctggccgccgtttctcctgggcaggacaaggcgcaaatccaacacaaactaagattgaccatgctttcgttaccactgactgggatttaatgtttgatgggtccaacttatatccactgtcttctgcgtgctctgaccatgcacctctccttttagttggaaatgagaaaagaacgaaatttccaaatttcagatttgaatcctgatggcttaaaattcctaggtttctggggattgtgcaggattcttggcaaaggccaattctcgccacaaacagcctagccaatttccgcttgaaactacgacgtcttgcccgcgacattaagagatggagccgtaatcaagttggagatatcaagttacaacttgctgttgcatccgaagtgatattccaactagaggtagcacaggaaaccaggaccttgtccaatgaagagcgtcttttgatctctaatctcaaaaccaaattttggctctcttagtcctaaacaaaattcagattaggcagcgctttaggcaaacatggcttaaggagggagatgtccactcaaaattctttcacattaaagtcaacttcaggaaagaagaacttcattccatcgctgcatacaccttccgggatagccatttccaccccagataaagaaggggaattgttccgtttcctcaaggaaagacctgggacatgttttcaaaaaaggccaggaatcaattggaatatgaaggaa

SEQ ID NO: 52122 - DNA, 946 bp, Oryza sativa
cagatcccaaacaaccctttaagcatgttgatcctatttaaagctattatttctattcaactatcgcatttattttcgaatgtcaatgggtggaattaccctatcctttgttatagcccttttgttcttgattactttattccttgataccttgggttataataatttgactggttgaactttattatattggttcaactagatattagatataattgcttagccctgcttagaaacattagcacactattgggataactataattcacttttatttcatgatggcttaatgatagttcacgatggtcaatcgtgattggttaattaattaatgtgccaactaaaacctggtaatggtgggttgtgagcacatggttttgatggtcgtgctcatgacaattaaggaccggttcacgagtttcggttgtgaaacattaaccgtgccaaccacaagccagcatgggcaacggctttatcttttgtatagcatggttcattgcgggtgtcgcgtcccaaaacgactctaaaatacatcctcgaaattatgcctagaataattaaaatccatgtgaaagcctccaacaattaaaatgtgcaaagttaaaagtcaaataaggcttggaggatttttgtatatttcctaaaagcctaaaatgtgtaaataaattttagtggaattttcagagcacaaataataattaagaagaaataaacaaagttaaaatggttttataaaaagaaaagccctaaaaagtcttttcccccccccttccccctcttgggccggctcggcccagccccctccctctctcttctctccctcgcggcccatccggccttcccccgcgcgcgcgccgctgacgggcgggcccgcccgccaccctcgctgacggggggggcccacgtcatcccctacctcgcgccgctcccgccgccttggccgtgc

SEQ ID NO: 52123 - DNA, 587 bp, Oryza sativa
ggctcggggcgggcgatgtgacgggcggcgacgcgacgggcgacgacgcgacggcagcgcacggggctcggggcggtgacgcgacgggtggtgacacgacgggcggcgatgcgatggcggcgacgcgacgggcggcgatgcgacggcgtcgcatagggctcggggcggcgacgcgacggcgacggcaacggcgatggcgacggcggcacggggctcgaggcggcgacggcaacggcgcgacggcgacggcgatggtgacggcggcgcgcggctcgaggcggcgacgcgacggcgcgacggcgacggagatggcgatggcggcgcggggctcgagacggcgacggcgacggtgtgcggcgatggcgatggcggcgcggggctcgagacggcgacgcgacagcgcgcggcgataggacggcggcgcggggctcgagacggtgacgcgatggcgcgcggcgatgggacggccgcgcggcggggtgcaggcgcgaggcagaggagggggcagagctaggggacctctgtcacgtcctgataaattcatcccgaaataaaaatcattttctaaaaggaataatagaattaat

SEQ ID NO: 52124 - DNA, 931 bp, Oryza sativa
ttattccggaagttttcaaatgattttgcaaagaaaaccaagttcctcaaatgattcactcagtctctccaaatgtatcacaatgaattcctcaccaattgtgctttttgattcctactctaaggttttaatatgtggagctcggcagggatcaaacatggaatacatgcattcacatttattactaagtcaaaagcttagactaaagcagaaaactaaacatactcaagatcaagatcatgcaatgtgtgtgtgatatatggtggaaatggtttatgaaggaaaataaagaaaatgcttctcctttgtgcctacttcattctcccaaaaatccttcttttattgattaggagagggcatgattacatttttcttcaacatcatgctcatgcttgatggagcataactttattatttttctttcttttcataatcatgcctttccctcctctctttctttttcaaaaaggatttttctttttaggagaagaaagcacatgaaagcatggagaatttattttggtggtaatatgaaaatggaatggaatattgcttagctcctagtgtaggagtttagcatgtgcatatatgtggatgtatgatcttgatcatagagcatgagaagtatctacacaagtcacaagagtttgacaaagttcaatggaatggcaagtaaccaaaatgtatatggtttaatcatgatagcacatttttggctttggcaggaatttttattaaattcggaactgtcaattttatcattttgaaaaacaaaacatccggaattcaaatcaaattagtatcaggatcatagcaattcttatttactatctcatatctcgcagcaacttagacttacatctgcaagtgcagctcatttacctcaagttcccggataattattggctacttatatttaacctttgagaga

SEQ ID NO: 52125 - DNA, 1238 bp, Oryza sativa
acttttgtgccttctggaaagctgttggttggcatagatttactgtggtagatgagcctggttctcgtctacttactttgcaatttttgtgcactttgaaagaaatagaagatggaatttccttttgctttttccataaataatacacacttacatggaaaggattaagtacacttcttggttttcacgattcctgtaaatcaatctccagaaattgaatttttaggttcgagaaaaataggttttgggaagatatttgtggtgctccaatttgcacgaaagctaggacgaatgacgtccataattctacacttaggctcatgcacaaatggattgttatgactttgtttcctagaggtgatcttagacccattaggggggatgaattaattatcttgtttgccatggttagaaagatcaaagttgctcctgtcaaatgtatgataaggcaatggttagaaagtataagattttttgctcctgttgagtgcacttccttgattactcggatagcaaagggactgggggtcatcaatgaccagattgcttatatcttggccgcttgtccctgtattgataagaattatctagtgcaagggcacattcttaaacatggagtagatggatctttgatatactttttccccggttgtacaaatgaaatcccgctgcctaatgcggggtatcatttgtacaacttccataaactaaccattcccctgcatatcatagaagaatctcgtgtaggtggaacatacagggagacacgcaacgtggcaagaaaggaacgagaaggttcatcatcctcaacaccgtgcagatgtatgaggcaggttgggaggcaacttgggatgcgcccggatggacccaagctccacgccacaacatcggagtctcaagctggacaagtgccagtgaggaccggtggcgtgcacctcatgacatacagtgggggacaaccaaccctccagattaagcagtatgcctccatccccaagtgaatggcgctcaagttcctctcgttgggtcttgagtgaaatcaccagcagaatgtataccctcgatgtgcagacgggagatatccaaaacaacctcgcggaacacatagcacagacgcaagaatggtaacagactgctgatgctcagttcgccaacatcaacaacatacatgatgcagtacagcccgacgaccttcaagcatactttcgctttcaggggttcaatcattatcaaggacc

SEQ ID NO: 52126 - DNA, 2475 bp, Oryza sativa
gcagtcgcggagtgcgggtaaagtgtacatccactgcaatgtgagtaaaccaaatctattcgaatagctgtgctcgcagttattgagcaccgggacatgtattacacttggctagactctaaattcttaacttgtgtgggatgagatactgcatgaagattttttttatgctgatggagccacttcctaagaggagggaaggtggacgtcctcagaaaaccatgacgactcaatggcgggaagctatccttgggatcacaatggatggtggacagaactgtcgttgtctaatgtgaacattggtattaaaacttgatcagtctatgataggtcttaggcttgtgaaaagaattacaaaacttgctttgcgcaaaagaaccatagccattctttgaataccctctatcatgtgcattgttgctgtggtgacttgctgagtacggttggtactcaccctttcaatatacaaactgaatcagaggtaggagttgaagcttcggaggatccctacgcttactaccaggagggtgatgaagacgatggcgctcagtaggtcttagttacggtcgttggctgtggcaatggcgtgccgctgctttaactccgctgccttatctacttctacttttggaatgtattccggaccgttcggtcctatgttctaagactatgcctgcgggcctatgatgtaataattcgcactagactctcgtgtatgtgcacttggtatttcagctatgaactcgtgagtaccagactacttgatccagggaaatggtactgtttacacgattgattcctgttataaaaacgggggtccacatacatataccttgcacctatatctttgagatatgcagcatagtagcaactcctgatcaacaaccaagtcttttgtttcctttcgtcctttactcaggacgagcaaaggttcaagcttggggggttttgttgacggtcgttatcgatcagtttcaaccgtcaatactaccaaaacagaggagaactagtgatgcttgcaatgcataaatatgttagaatataaatattccactagtattaggtatactaacattttgtagagaatgacaaaaaaatggaggagaatcgacatcaactcaaacgataaatcaatcggacgatgtcaagaatcagacttatgtatgaatggggcacgaagtcagaattgacatgatgaattgggccaaaattcacaagtctgcagagaaggatcacagaggtggccgccagccaaaattgggctggattgggccggccccaggttcggccgaacctccctcatcgccgctggatgcagggtttcttctggacggtgtggattagcttccaatgatggttggagggtattttcgacattccaactgtcacaaccgtcattgggaggctatataaacccctcaccttctcacttcactcacacacctcaagcaatagctctctcatttctctcaagtttagtttagtagtatctagctggtggaaaagaaatagagtagaaatcaggagtccggaagccttcggaagagttcgggtatggctctagtagcttttctcttctcttttgtaagctttgtagttttaatagaatactcttctaaatacatttatggtattgaaatacttttcgagtatatgagtacctagtttacattatgttcatgttatactaaatatacggctagcttatctgggagatgctttggtgcttatacaattactctatgtcatgacgatgatattagagtagtatctgctagtttagacgtggtgtctagattacgggatatcattatttggggttatatattgcggatgagaggtgggccgttgatggtgacagctcagtatgggtattcctccgcgccggtatataatcctaagttaattccctggggagggtatttctccgtatttagccccggttgtatggtcatgacgggctgtcgtaaggaactcggcagtcaggggtggcttctcgaagtaccaggaggacatcggatagagggtattagctagtatatcggttaactagtgtcacaccctaaaaattcaaaatatataaattgttgtttaaatggaatttttagaattaattttaaaagcctagaagagaagatctaattttaattaataaattccaatataaaatggggccagataaaatttcattaaatactttgcttaattctataattcctagatttttctgggatttatttgagctaagaaagtatttttaataaatggaattgcatttaagaaataatttaaattgaaaaagggtttaaaaagtctcttttggctttgggccgaaagtcggcccaaaatctcttttttttttttcctcggcccagccgggccagttcgccgggggggggggggcgtcgccgctgacaggtgggggcccacctgtcagggccatcgtttaccttcggccgccgccgccgaaaccct

SEQ ID NO: 52127 - DNA, 805 bp, Oryza sativa
ttcagtaagagaagctttggagaagatgtcttaggtggagtcctggcttataccccagttgagcgcctgtgaagatggagccgtaggcccgctagtccgctgctgtttatttttgattgtcaggcctgaagcgcctttgtaataatgtaaatattatcgatataataaagatgtgtcttttatatcatgtttgtgtggtgtaccccggcttttcctgggacggggattaatacactagcgttcgggaaaaggcaattttcccggtcgcgacaagcaaatccaccccccttacaagaatctcgtccccgagattcgaggaggctagcaagaagataggttgggcggtcttctcttcttgtctgacttcttccgttgcgtcttgacgaacttccagcaaaactttaccactcggaactgcttggcttgacctcctgttgcggatggaatcttctcttcacctgacttggaccaggatgcaccttttggctgactcagactaggttgcggtagttcagtgatgcttccgttctagaacttctcatgattcatatcttcggagtcaacctcggacaagttatcaacttcatgtcatgcgtcgtaacctgcttgtcattactaggataccatgcttgttatttgcttctaactcgccaccaactgcctcatattagcttccctggtctccgggtgatagctacttctgctatttgatgcaagggtcgataactttacctttgaattatgcttcccaagagagccaacttatcctacttgttatactttgacgtcttcccaaatggcttta

SEQ ID NO: 52128 - DNA, 2521 bp, Oryza sativa
gactaattcgcgagacgaatcttttgagtctaattacgccatgattttgacaatgtgatgctacagtaaacttttgataattatggattaattaggcttaaaaaaatcgtctcgcgaattagctctcatttatgaaattagtttttttattagtctatgtttaatactctaaattagtgtccaaacatccgatgtgacatgggctaaaaagttttagccccatctaaacacccctaatgcaaaaggagagagtttctgtccaccagcacagagaaaactattcctgaagaaccaggacagaaaacccagaacacccatgtcttgtgtcttctctaccgctgcttccttgctgaaccgatagatgctgcccgtccatgccaaaacatctccctcccacaatctcccattaaagtccaattagaaattatgtatttggaagatgccatcctatttaatttagagttcattgtaatgataacaaaataataatactatataagacattttattagcaccacgtaaaaacattttctttagtttgtaaggtattccctcaatttcgtaatacagggcccgcctataattattcttttgcagttttttcaacatgtaatgccttataccaaagcttgttttaatgctatattatcaccattttatccctcaagtggtactactgttagttgttattgttgtggctaagcagtactactatagaaaagatagcaatgtcattttatccttttgtgttgtactgttgttagcttttaaaatttcttgatctatgtacccagctgatattgccatatattatgaaatggagggagtagaggatagaaacctagaacggtactttccattaattcagtctgttgctcttaagatgaaataaagttggtaataggcaaatagcaaaattagccaaaagcgcacatgatgaccttttaagaacatattccatgttctgcacattatgcacaagtcaaaatatgaagaataaacacatggaacaaatccttacaattgagacatctgatgaggtaacttgtcttgttcatgaaagccgacagtatcagccttgaccctaagcaaataccacacatcttaataaagttagcatgttgctgattcaaatcaatttaaaaagcatagcacgatattcaataatgaaaaggatgcttagtttgacagtaatatccacaatgttttcagcaggttatattatttgttcttttaccctaaaaagcatacagtttttttaataagttaaaagtattgtcctgacccctgatatatgagcacaattaatgcgagaaaaaaaacacttaagcctacagtaacaataagtcaacatgttagatgcagctcatggattggcaataccaaacaacaaagaatgcataattggactatgggagcagatgtaagcatgaataaaaatgagatgaatggtgcaggtgtacaatgcgcaattaccactgcaatctattctagcttagacatgggtacatgttaatctgttttggtatacaagcaagtgattgccaaagttaataaatgactggaatactcatgccgccataggagcaataaaaatgaggggacaagacatgacgcggtacattacttattgatgctctcttagataaatgcctgtgtaatgggactatgggagctggactaaactatcgggaacacgaggcaatcagtgtgacggttgtgagatacgaaggctgtgtttagatccaaacttacaacttttttcatcacatcaacttgtcatacacacaacttttcagtcacattgtaacaattttaacccaaactttcaactttggaaggaactaaacacagtcgaaacaatgaaggcaaaaccatgaaactaaaacatttagtatcctatatatctataattctatatatgaagttcatcctcactaactgtagttaatgttatttttctcatctctcattaagccacatcactttaattatttgtaatccttggatgattgatctatggtccaaattatctccctcattttctcctcttatgaaatcatatcacctcagttttgcctttagatgattaatctatattatctcccttatttcccttctctcattgagccacatcatcatagttttgcttttaaatgatcaatctatacataattcaaattgttataatcacatcatcttaactgtttattgtttttttttcaatagtcagtcaaagatgaaaattatataaagtcatctagctatcttacatgttatgtctactattatcatacaaaattcccacaccaatgcgcagtagttattaataagatcatgccatcaagcacagcattgtcgaaagtaaaaggcatagaaggtttcacacataaacaagattataacgcaagattgaaagcataggaaactgcaagcaacgttatcaaacatctaccacttccagcaggacaaaataaactaaggaagacatcatacatggttgaatcttcctccttgactg

SEQ ID NO: 52129 - DNA, 640 bp, Oryza sativa
attcctgcagcccaggaaaattttagaagtgcctagatagggaactttttaagtttaggtgctatagagggaagagcaacttttttttgatgctagatagggaattttctctacaatgatcatacttcccatacgggcattgcttatttgactctgttttgaagtctaataactaatttgaccctacttttttaggtttgctcatttaaccctgtttttcaaaattgaagataaaggttgaccctattctgtgaagtctagataacggtgttaactgagtgacgatttctcttttttgcccttgctcgtttgaccctaatgctacattttaacatattcgtaacaaatttgacatagatttgagaaaattttgacatatttgatttcaatttgataaatttagctttagtttgacaatttgactttaatttttttaaaaaaaattaagagcatttctcctatcttatccatcccaaaatgtataaaataaagcaaaaacatggcaaagagcgctgcagtcgccgtcgccgcaatggctgccgctctgagcacgatagcaaccgacgccactcccttccacctccccgagcacagcagctgctgtcgctgctcccttattccgcgtgcagctgccgccgtt

SEQ ID NO: 52130 - DNA, 637 bp, Oryza sativa
agtatatgtatggagtatgtaccgattgagataaggtgtagttatacttgcaattgcaagataccactgcacataattttgaccgtccgtttgtaacttgtatgattaatggttcagatcaaatgctacagtaatcatgcgaataatactccgtgctgtactgtatgcgtcgtacagtatataatctagacttttcgatttgcatccaacaacatgcacttttactgcttaagttggagtcataatagtgactgcagctgatccgaatccagtagctacatcctactagatttttgttttgtttagattactgggaaaaaacatatgatctatttaatcgtataggtaaattaaatataaaaataaacttaacaaatagcttaaaacaattgatctaaataatataacagaaaaatatatttttagtatgtattttttaaaacacatagaaaataatctacttttaataacccgataaataagctaagtcattccaccccataactcattttgttataaatacctacccctattcagttttgtcgcaaaaaccacttcaatgcgcttgtgtttaacccgaataacatgtttttcataaactgtgagcgtcaatatgatctttattaaattaaatatt

SEQ ID NO: 52131 - DNA, 636 bp, Oryza sativa
atctgcatgttaataaaaaaagagttgtgcctgagagaagctatgatgtccacagtagctagaatgttttcgcacgaaacatcgtttagttgttccggagggctgaagttcttgaactgcaattcaaaaactttggagagctgatacattgaaggttctttttttctaattaagatgtggattgtaccttagttttcattagcactagcacgtttttttaaaatgctaaacaatgtgtatcataaaaaaaactttctatataaaagttgctttaaaatatcaaataaatataatttttaaatttgtaataattaaaactcaactataattgcgctaatgactttctcgttttgtgtgctaactttcgtttgatgatgtaaaatgaagttagtgcacacaaagcgaaaagtaagaaagtaaattttataactcatatccactattttgtcatataattctctcgcaaaaacttgcggggttcttatctagttaatacatgatgaggtgatcgagattagaaataagtatgggaagggtgcaggtctcagagggctgatgcgatgatggggcctatcagagttagtaatggaataaaactcatcttttttagctatatttatgacaaaatttacacct

SEQ ID NO: 52132 - DNA, 943 bp, Oryza sativa
ccaaaaatcatgtttggtgcttttaaactttttcattccggtgaaaaacatcgcacccacctatggcaatattagcattaattgacaaaagttcgccgcgcgaatcacgaagtgattttttgccacgaatgcacccaacacactccaatatgtccaaaaatcatgttttggtgctttttgaactttttcattccggtgaaaaacatcgcacccacctatggcaatattggcattaattgacaaaagttcgccgcgcgaatcacgaagtgattttttgccacgaacgcacccaacacactccaatatgtcgagaaatcaagttttggtgctttttgaactttttcattccggtgaaaaacatcgcacccacctataccaatattggcagtaattgacaaaagttcgccgcgcgaatcatgaagtgattttttgccacgaacgcacccaacacagtccaatatgtccaaaaatcatgttttggtgctttttgaactttttcattccggtgaaaaacatcgcaccaacgtgtgccaagatatggcaatattggcattaattgacaaaagttcgccgcgcgaatcacgaagtgattttttgccatgaatgcacccaacacactccaatatgtccaaaaatcatgttttggtgctttttgaactttttcattccggtgaaaaacatcgcacccacctatgccaatattggtagtaattgacaaaagttcgccgcgcgaatcacgaagtgatattttgccacgaatgcacccaacacactccaatatgtccaaaaatcatgttttggtgctttttgaactttttcattccagtctaaaacatcgcacccacctatgccaatattggcagtaattgacaaaagttcgctgcgagaatcacgaagcgattttcattccggtgaaaaacatcgcacccacctatgccaatat

SEQ ID NO: 52133 - DNA, 827 bp, Oryza sativa
gactttttcattccggtgaaaaacatcgcacccacctatgccaatattggcagtaattgacaaaagttcgccgcgtgaatcacgaagtgattttcattccggtgaaaaacatcgcacccacctatgccaatattggctgtaattgacaaaagttcgccgcgcgaatcacgaagtgatattttgccacgaatgcacccaacacactccaatatgtccaaaaatcatgttttggtgctttttgaacttttttattccggtcaaaaacatcgcaaccacgtgtgccaatattggtagtaattgacaaaagttcagcgcgcgaatcacgaagtgatattttgccacgaatgcacccaacacactccaatatgtccaaaaatcatgttttggtgctttttgaactttttcattccggtgaaaaacatcgcacccacctatgccaatattggctgtaattgacaaaagttcgccgcgcgaatcacgaagtgatattttgccacgaatgcacccaacacactccaatatgtccaaaaatcatgttttggtgctttttgaacttttttattccggtcaaaaacatcgcaaccacgtgtgccaatattggtagtaattgacaaaagttcagcgcgcgaatcacgaagtgatattttgccacgaatgcacccaacacactccaatatgtccaaaaatcatgttttggtgctttttgaactttttcattccggtgaaaaacatcgcacccacctatgccaatattggctgtaattgacaaaagttcgccgcgcgaatcacgaagtgatattttgccacgaatgcacccaacacactcc

SEQ ID NO: 52134 - DNA, 7657 bp, Oryza sativa
atcaagtctaatttcaaatggatccagccacatgtccatatctgttctggagcggccgcaattgtcattttactcccgactattttctgtccatggtgctgcgtcatctcttttggcccaatgggctgtgtatccatgttgggcccattaggggcgcgtcctagggttggagcacgaccctatggtcgttcttcccctctttttatacctctagtcgccgccaagaacaggcgggttttgatgatagagatagcttcttgctaccggctcgcagcgcgcgtgttggctaaaccgcccgtctgcctgtaatcggaaccccaccatattgtgtttgatagtgaaactttcatctttatctagcaatttcagtgcttgtcctacttgttcttgcttgttcttcgattgcttgcaggacgagtgtcctcgtggccgggttgacgcgcaccacaagttcgcggcgaccattggagacggtgtatcggttgctaaggcgcagcgtctttggacagttgtagtcgggccgtgaacgtcgacttcatctaatcgagttatcccttacctctcatcgaaagatcgggccacaaaccctagcgggttcgcatcatgcacccaacacactccaatatgtccaaaaatcatgttttggtgttttttgaactttttcattccagtctaaaacatcgcacccacctatggcaatattggcattaattcacaaaagttcgccgcgcgaatcacgaagtgagtttttgccacgaacgcacccaacacacaccaatatgtccaaaaatcatgttttggtgctttttggactttttcattccgttgaaaaacaacgcacccacgtgtgccaatatatggcaatattgacattaattgacaaaagttcgccgcgcgaatcacgaagtgattttttgccacgaatgcacccaacacactccaatatttccaaaaatcatgttttggtgctttttgaactttttcattccggtgaaaaacatcgcacccacctatgccaatattggtagtaattgacaaaagttcgccgcgcgaatcacgaagtgatattttgccacgaatgcacccaacacactccaatatgtccaaaaatcatgttttggtgctttttgaactttttcattccggtgaaaaacatcgcaaccacctatgccaatattggtagtaattgacaaaagttcgccgcgcgaatcacgaagtgatattttgacacgaatgcactgatgaggacatcaacaccatcgatacatccacgtccccccatatacagcatgatggtcctattacccgcgctcgtgcacgtcaactaaattatcaggtgagttctttcttgagttcatattcctcgtctttatacctcggagacgcgtgcactcgtgttttactcaggaacgatggagaggatccaaagggaagaggattcgcgcggggtggattcggactgcagggcagcgccaacttctgacggccgccacgacttcatgcgaactccgatttgggcgtgcaagtacttcatggaaagcttatcaagtctaatttcaaatggatccagccacatgtccatatctgttctggagcggccgcaattgtcattttactcccgactattttctgtccatggtgctgcgtcatctcttttggcccaatgggctgtgtatccatgttgggcccattaggggcgcgtcctagggttggagcacgaccctatggtcgttcttcccctctttttatacctctagtcgccgccaagaacaggcgggttttgatgatagagatagcttcttgctaccggctcgcagcgcgcgtgttggctaaaccgcccgtctgcctgtaatcggaaccccaccatattgtgtttgatagtgaaactttcatctttatctagcaatttcagtgcttgtcctacttgttcttgcttgttcttcgattgcttgcaggacgagtgtcctcgtggccgggttgacgcgcaccacaagttcgcggcgaccattggagacggtgtatcggttgctaaggcgcagcgtctttggacagttgtagtcgggccgtgaacgtcgacttcatctaatcgagttatcccttacctctcatcgaaagatcgggccacaaaccctagcgggttcgcatcatgcacccaacacactccaatatgtccaaaaatcatgttttggtgttttttgaactttttcattccagtctaaaacatcgcacccacctatggcaatattggcattaattcacaaaagttcgccgcgcgaatcacgaagtgattttttgccacgaacgcacccaacacactccaatatgtccaaaaatcatgttttggtgctttttgaactttttcattccgttgaaaaacatcgcacccacgtgtgccaatatatggcaatattgacattaattgacaaaagttcgccgcgcgaatcacgaagtgattttttgccacgaatgcacccaacacactccaatatgtccaaaaatcatgttttggtgctttttgaactttttcattccggtgaaaaacatcacacccacctatgccaatattggtagtaattgacaaaagttcagcgcgcgaatcacgaagtgatattttgccacgaatgcacccaacacactccaatatgtccaaaaatcatgttttggtgctttttgaactttttcattctggtgaaaaacatcgcacccacctatgccaataatggcagtaattgacaaaagttcgccgcgcgaatcacgaagtgattttcattccggtgaaaaacatcgcacccacctatgccaatattggcagtaattgacaaaagttcgccgcgcgaatcacgaagtgattttttttccacgaatgcaccaaccacactccaatatgtccaaaaatcatgttttggtgctttttgaactttttcattccggtgaaaaacatcgcacccacctatggcaatattagcattaattgacaaaagttcgccgcgcgaatcacgaagtgattttttgccacgaatgcacccaacacactccaatatgtccaaaaatcatgttttggtgctttttgaactttttcattccggtgaaaaacatcgcacccacctatggcaatattggcattaattgacaaaagttcgccgcgcgaatcacgaagtgattttttgccacgaacgcacccaacacactccaatatgtcgagaaatcaagttttggtgctttttgaactttttcattccggtgaaaaacatcgcacccacctataccaatattggcagtaattgacaaaagttcgccgcgcgaatcatgaagtgattttttgccacgaacgcacccaacacagtccaatatgtccaaaaatcatgttttggtgctttttgaactttttcattccggtgaaaaacatcgcacccacgtgtgccaagatatggcaatattggcattaattgacaaaagttcgccgcgcgaatcacgaagtgattttttgccatgaatgcacccaacacactccaatatgtccaaaaatcatgttttggtgctttttgaactttttcattccggtgaaaaacatcgcacccacctatgccaatattggtagtaattgacaaaagttcgccgcgcgaatcacgaagtgatattttgccacgaatgcacccaacacactccaatatgtccaaaaatcatgttttggtgctttttgaactttttcattccagtctaaaacatcgcacccacctatgccaatattggcagtaattgacaaaagttcgctgcgagaatcacgaagcgattttcattccggtgaaaaacatcgcacccacctatgccaatattggcagtaattgacaaaagttcgccgcacgaatcacgaagtgatattttgccacgaatgcacccaacacactccaatatgtccaaaaatcatgttttggtgcttgttgaactttttcattccggtgaaaaacatcgcacccacctatgccaatattggcagtaattgacaaaagttcgccgcgtgaatcacgaagtgattttcattccggtgaaaaacatcgcacccacctatgccaatattggctgtaattgacaaaagttcgccgcgcgaatcacgaagtgatattttgccacgaatgcacccaacacactccaatatgtccaaaaatcatgttttggtgctttttgaacttttttattccggtcaaaaacatcgcaaccacgtgtgccaatattggtagtaattgacaaaagttcagcgcgcgaatcacgaagtgatattttgccacgaatgcacccaacacactccaatatgtccaaaaatcatgttttggtgctttttgaactttttcattccggtgaaaaacatcgcacccacctatgccaatattggctgtaattgacaaaagttcgccgcgcgaatcacgaagtgatattttgccacgaatgcacccaacacactccaatatgtccaaaaatcatgttttggtgctttttgaactttttcattccggtctaaaacatcgcacccacctatggcaatattggcattaattgacaaaagttcgccgcgcgaatcacgaagtgattttttgccacgaatgcacccaacacactccaatatgtccaaaaatcatgttttggtgctttttgaactttttcattctggtgaaaaacatcgcacccacctatgccaataatggcagtaattgacaaaagttcgccgcgcgaatcacgaagtgattttcattccggtgaaaaacatcgcacccacctatgccaatattggcagtaattgacaaaagttcgccgcgcgaatcacgaagtgattttttttccacgaatgcaccaaccacactccaatatgtccaaaaatcatgttttggtgctttttgaactttttcattccggtgaaaaacatcgcacccacctatgccaatattggtagtaattgacaaaagttcgccgcgtgaatcacgaagcgatattttgccacgaatgcacccaacacactccaatatgtccaaaaatcatgttttggtgctttttcaactttttcattccagtctaaaacatcgcacccacctatggcaatattggcattacttcacaaaagttcgccgcgcgaatcacgaagtgagtttttgccacgaacgcacccaacacacaccaatatgtccaaaaatcatgttttggtgctttttggactttttcattccgttgaaaaacaacgcacccacgtgtgccaatatatggcaatattgacattaattgacaaaagttcgccgcgcgaatcacgaagtaattttttgccacgaacgcacccaacacactccaatatgtccaaaaatcatgttttggtgctttttgaactttttcattccggtgaaaaacatcgcacccacctatggcaatattggcagtaattgacaaaagtttgccgcgcgaatcacgaagtgattttttgccacgaacgcacccaacacactccaatatgtccagaaatcatgttttggtgctttttgaactttttcattccggtgaaaagcatcgcacacacgtgtgccaatatatggcaatattggcattaattgacaaaagttcgccacgcgaatcacgaagtgattttttgccacgaacgcacccaacacactccaatatgtccagaaatcatgttttggtgctttttgaactttttcattccggtgaaaaacatcgcacccacctatgccaatattggcagtgattgacaaaagttcgccgcgcgaatcacgaagtgatttttttccacgaatgcaccaaccacactccaatatgtccaaaaatcatgttttggtgctttttgaactttttcattccggtgaaaagcatcgccaacacgtgtgccaatatatggcaatattggcattaattgacaaaagttccccgcgcgaatcacgaagtgactttttgccacgaatgcacccaacacactccaatatgtccaaaaatcatgttttggtgcttgttgaactttttcattccggtgaaaaacatcgcacccacctatgccaatattggcagtaattgacaaaagcttgccgcgcgaatcacgaagtgatattttgccacgaatgcacccaacacactccaatatgtccaaaaatcatgttttggtgctttttgaactttttcattccggtctaaaacatcgcacccacctatggcaatattggcattaattcaaaaaagttcgccgcgcgaatcacgaagtgattttttgccacgaacgcacccaacacactccaatacgtccaaaaatcatgttttggtgcttttagaactttttcattccggtgaaaaacatcgcacccacgtgtgccaatatatggcaatattggcaataattgacaaaagttcgccgcgcgaatcacgaagtgattttttaccacgaatgcacccaacacactccaatatgttcaaaaatcatgttttggtgctttttgaaatttttcattccggtgaaaaacatcgcacccacctatgccaatattggcagtaattgacaaaagttcgccgcgcgaatcacgaagtgatttttttccacgaatgcaccaaccacactccaatatgtccaaaaatcatgttttggtgcttttcaaactttttcattccggtgaaaaacatcgcacccacgtgtgccaatatatggcagtattggcattaattgacaaaagttcgccgcgcgaatcacggagtgattttttaccacgaatgcacccaacacactccaatatgttcaaaaatcatgttttggtgctttttgaactttttcattccggtgaaaaacatcgcacccacctatgccaatattggcagtaatagacaaaagttcgccgcgcgaatcacgaagtgatattttgccacgaacgcacccaacacactccaatatgtccagaaatcatgttttggtgctttttgaactttttcattccggtgaaaaacatggcacccacctatgccaatattggcagtaattgacaaaagttcgccgcgcgaatcacgcagtgattttttaccacgaatgcaccaaccacactccaatatgtccaaaaatcatgttttggtgcttttcgaactttttcattccggtgaaaaacatcgcacccacgtgtgccaatatatggcaatattggcattaattgacaaaagttcgccgcgcgaatcacgaagtaattttttgccacgaacgcacccaacacactccaatatgtccaaaaatcatgttttggtgctttttgaactttttcattccggtgaaaaacatcgcacccacctatggcaatattggcagtgattgacaaaagttcgccgcgcgaatcacgaagtgatttttttccacgaatgcaccaaccacactccaatatgtccaaaaatcatgttttggtgctttttgaactttttcattccggtgaaaagcatcgccaacacgtgtgccaatatatggcaatattggcattaattgacaaaagttccccgcgcgaatcacgaagtgactttttgccacgaatgcacccaacacactccaatatgtccaaaaatcatgttttggtgcttgttgaactttttcattccggtgaaaaacatcgcacccacctatgccaatattggcagtaattgacaa

SEQ ID NO: 52135 - DNA, 1076 bp, Oryza sativa
tatgccaatattggctgtaattgacaaaagttccccgcgcgaatcaggaagtgatattttgccacgaatgcacccaacacgctccaatatgtccaaaaatcatgttttggtgctttttgaacttttttattccggtcaaaaacatcgcaaccacgtgtgccaatattggtagtaattgacaaaagttcagcgcgcgaatcacgaagtgatattttgccacgaatgcacccaacacactccaatatgtccaaaaatcatgttttggtgctttttgaactttttcattccggtgaaaaacatcgcacccacctatgccaatattggctgtaattgacaaaagttcgccgcgcgaatcacgaagtgatattttgccacgaatgcacccaacacactccaatatgtccaaaaatcatgttttggtgctttttgaacttttttattccggtcaaaaacatcgcaaccacgtgtgccaatattggtagtaattgacaaaagttcagcgcgcgaatcacgaagtgatattttgccacgaatgcacccaacacactccaatatgtccaaaaatcatgttttggtgctttttgaactttttcattccggtgaaaaacatcgcacccacctatgccaatattggctgtaattgacaaaagttcgccgcgcgaatcacgaagtgatattttgccacgaatgcacccaacacactccaatatgtccaaaaatcatgttttggtgctttttgaactttttcattccggtctaaaacatcgcacccacctatggcaatattggcattaattgacaaaagttcgccgcgcgaatcacgaagtgattttttgccacgaatgcacccaacacactccaatatgtccaaaaatcatgttttggtgctttttgaactttttcattccggtgaaaaacatcgcacccacctatgccaatattggcagtaattgacaaaagttcgccgcgcgaatcacgaagtgatattttgccacgaatgcacccaacacactccaatatggcccaaaatcatgtttttggggctttttgaactttttcattccggtttaaaacat

SEQ ID NO: 52136 - DNA, 827 bp, Oryza sativa
acttttgtcaattactgccaatattggcataggtgggtgccatgtttttcaccggaatgaaaaattcaaaaagcaccaaaacatgatttctggacatattggagtgtgttgggtgcgttcgtggcaaaatatcacttcgtgattcgcgcggcgaacttttgtctattactgccaatattggcataggtgggtgcgatgtttttcaccggaatgaaaaagttcaaaaagcaccaaaacatgatttttgaacatattggagtgtgttgggtgcattcgtggtaaaaaatcactccgtgattcgcgcggcgaacttttgtcaattaatgccaatactgccatatattggcacacgtgggtgtgatgtttttcaccggaatgaaaaagttcaaaaagcaccaaaacatgatttttggaaatattggagtgtgttgggtgcattcgtggcaaaaaatcacttcgtgattcgcgcggcgaacttttgtcaattaatgtcaatattgccatatattggcacacgtgggtgcgttgtttttcaacggaatgaaaaagtccaaaaagcaccaaaacatgatttttggacatattggtgtgtgttgggtgcgttcgtggcaaaaactcacttcgtgattcgcgcggcgaacttttgtgaagtaatgccaatattgccataggtgggtgcgatgttttagactggaatgaaaaagttgaaaaagccccaaaacatgatttttggacatattggagtgtgttgggtgcattcgtggcaaaatatcccttcgtgattcacgcggcgaacttttgtcaattactaccaatattggcataag

SEQ ID NO: 52137 - DNA, 968 bp, Oryza sativa
aattactgccaatattggcataggtgggtgcgatgtttttcaccggaatgaaaaatttcaaaaagcaccaaaacatgatttttgaacatattggagtgtgttgggtgcattcgtggtaaaaaatcacttcgtgattcgcgcggcgaacttttgtcaattattgccaatattgccatatattggcacacgtgggtgcgatgtttttcaccggaatgaaaaagttctaaaagcaccaaaacatgatttttggacgtattggagtgtgttgggtgcgttcgtggcaaaaaatcacttcgtgattcgcgcggcgaacttttttgaattaatgccaatattgccataggtgggtgcgatgttttagaccggaatgaaaaagttcaaaaagcaccaaaacatgatttttggacatattggagtgtggttggtgcattcgtggaaaaaaatcacttcgtgattcgcgcggcgaacttttgtcaatcactgccaatattgccataggtgggtgcgatgtttttcaccggaatgaaaaagttcaaaaagcaccaaaacatgatttttggacatattggagtgtgttgggtgcgttcgtggcaaaaaattacttcgtgattcgcgcggcgaacttttgtcaattaatgccaatattgccatatattggcacacgtgggtgcgatgtttttcaccggaatgaaaaagttcgaaaagcaccaaaacatgatttttggacatattggagtgtggttggtgcattcgtggtaaaaaatcactgcgtgattcgcgcggcgaacttttgtcaattactgccaatattggcataggtgggtgccatgtttttcaccggtatgaaaaagttcaaaaagcaccaaaacatgatttctggacatattggagtgtgttgggtgcgtttcgtggcaaaatatcacttcgtgattcgcgcggcgaacttttggctttactgccaatattgg

SEQ ID NO: 52138 - DNA, 562 bp, Oryza sativa
gaaaaattcaaaaaacaccaaaacatgatgtttggacatatggagtgtgttgggtgcatgatgcgaaccccattgggtttgtggcccgatctttcgtgacaggtaagggataactcgattagatgaagtcaaccttcacggcccgactacaactgtccaaaacgctgatggcttacaccgatacaccgtctccaatggtcgccgcgaacttgtggtgcgcgtcaacccggccacgaggacactcgtcctgcaagcaatcgaagaacaagcaagaacaagtaggacaagcactgaaattgctacataaagatgaaagtttcactatcaaacacaatatggtggggttccgattacaggcagacgggcggtttagccaacacgcgcgctgcgagccggtggcaagaagctatctctatcatcaaaacccgcctgttcttggcggcgactcgaggtataaaaagaggggaagaacgaccatagggtcgtgctccaaccctaggacgcgcccctaatgggcccaacatggatacacagcccattgggccaaaagagatgacgcagc

SEQ ID NO: 52139 - DNA, 782 bp, Oryza sativa
gtttttcaccggaatgaaaaagttcaaaagcaccaaaacatgatttttggacatattggagtgtgttgggtgcattcgtggcaaaatatcacttcgtgattcgcgcggcgaacttttgtcaattactgaccaatattggcataggtgggtgcgatgtttttcaccggaatgaaaaagttcaaaaagcaccaaaacatgatttttggaaatattggagtgtgttgggtgcattcgtggcaaaaaatcacttcgtgattcgcgcggcgaacttttgtcaattaatgtcaatattgccatatattggcacacgtgggtgcgttgtttttcaacggaatgaaaaagtccaaaaagcaccaaaacatgatttttggacatattggtgtgtgttgggtgcgttcgtggcaaaaactcacttcgtgattcgcgcggcgaacttttgtgaagtaatgccaatattgccataggtgggtgcgatgttttagactggaatgaaaaagttgaaaaagcaccaaaacatgatttttggacatattggagtgtgttgggtgcattcgtggcaaaatatcgcttcgtgattcacgcggcgaacttttgtcaattactaccaatattggcataggtgggtgcgatgtttttcaccggaatgaaaaagttcaaaaagcaccaaaacatgatttttggacatattggactgtggttggtgcattcgtggaaaaaaattactacttgattcgcgcggcgaactttggtcaattactgccaatattggcataggagggtgc

SEQ ID NO: 52140 - DNA, 755 bp, Oryza sativa
cattgatacattctttgattccttttatattatatactccttgatagcatattgatagtaattcattgggagtacataggaattgattggattgggttctttagggttgatcactactttgttaggattgcattatctactgtatgtattctttggttgattgatactcgctacatgcagcgcctataccacccatgcgctatacacaccgtaaggacgactctatgccgagacatatttcagtccgtcacactctgcagatcatctcggtcaaaataaagggaataagagggggcttacagtggccgatcaatgtgtttggtctcattgctgcgcgcgacacgattgaccgcaaccgcattatgatcttcaaccgcaccagggataactgccaaacaattactaaagaggtgcactttatttcctattgtacatcgttttatatttcttccttttgcataattaaatcatgatttgtgcgtggacacacattgtgctactagtagtttttactatttatatatagagatatttgttgcactttattccttggtttcttcatatcaaattagcccacctcaaatggacttttagaagactacttatacatggtgatacagtttgcttgcttctagtaatgcattgccatggctaagtataggatttccacatttgttacttatatcagaatcataaagacagctcaatttacatagaaaaccattcctaccataactaaacatactaatccgtat

SEQ ID NO: 52141 - DNA, 2120 bp, Oryza sativa
aggagggggtggcgtccggcaacgcgagctgggtggagcccgaccccgacgacctcgtcttccccggccctgaccgcgcggcgctgtggtcggactcgtcggacgacggggagaggcgggaggaggccgaggccaccgagccgctgccggtggaggcggcagcggcggaggtggaggcgggcgagggcgcggtgacgaagggcggaggggctggggcgggggtggtgcggtggtggcacctgccgatgggcgtgctccgggcgtgggcgctgcgggcggcgaggagcgtgtggtcgttgcccgtcgccgtcgcgctgctcggcatcgccgtgctggggcggcgcctgtaccgcatgcggcggcagagcaaggccgtggcgcgcgtccgcctcgtcctcgacgaaaaggtgaggcctctcgccgctttcccggccatgcccttgccgtgggttaaacactccaaccttgcgccactgtgcttgtgtaagcgtctcattttgtttgtgtcatcctgtatcatccacatgctgctcgaaaatgctacaaatatttttaatatttttctataaacttgatcaaacttataaagatttgactaagaaaaaaaagtcaaaatgacttataatttgaaatagagggagtaccttgtttgattttagggtgaaaacagcataaaatttcaacttccctatccattgaaaacaaaaggtgcagttctcaagtctcaaaccaaacacaaaccattttacttcaggaacctgatattactggctaagcatgtaagcaatagccaataggtagctcctttagagcctataggtgattgcatttttctttaagcaaattacatgagttaagtatggttgcaagctgatgagaaaatatgtagctccttgtactaatcttgtcgccatcgtcctcataatattgcacaaagaattctttctgtttgtgactttgtagtttgtactgccatactagtggcaggatgtgcatcgcctacctgtgtttgcgtgtgcacgcgtgtatcaacggggcaaagcgctgaactttgacttacttcgaaagatgattaggaggacttagagtagagcctgatcacataagagcatcctgtaatatgcttatatgagacaaataccatataagacggttttcaaaaaacaaatactatataagagcagagcctgcataggttgcatcctgtcgcacagggcatgaacccacttataggtcaaaataaacgggtttgcggcttattttggcctataagtgggtttcacgggttaaccacttatatccttacgcacaggttacagtggtatgtaaatgcaagtaattccataattgttgaatgtaatgccatgtgatttgtcgacgacaattgtgctgacccttaacgttgttcatggtatcagtgcgttccccattattgcttagcttagctctgtgtggattcttactgtcatctgttccttaataattttaattgacttatgcagaaggcatcccagttcaaggcccaagcatcacgcctgaatgaatctttcccaatggcacgccgagctccgatcatgaagcctctgcttcctgcgaatggagtgaccccatggcctgtgctgggacacatctgagcttgagatcgacggcataggactagtaatacaattgtccaaagttacttggcttgtgagcataccatattggtccctaaagatctagccgctataccgctacttggagtatacacctctggttgtggaaggtagttacattcccactttatgtgggatgccatttaggccttctcagctttcatgtttcttttgtaccttataattttcttctgtagtgttgtgttaccatatgcgcttgaacattgtatctgtaattctgtatatatgacaaagtaaccatacagattgggagtttgaaactgtgctcagcttcctttcgctactgttaatttagctgtttccgtgctgatatactctctgcgtcactgcgtgtatgcttgattaatgaaaaggtcgcagattactttgaatacctagagggttgagcccaactgcccatagcaagtatccctaagagcaagtttaatagtatagcccactact

SEQ ID NO: 52142 - DNA, 710 bp, Oryza sativa
gaaaccgcgagacgaatcttttgagcccaattaatccgtcattagcgcatgtgggttaccgtaacatttatggctaatcatggactaattgggctcaaaagattcgcctcgcgatttttcccataactgtgcaattagttttttaatttatttatatttaatactctatacatgtgtctaaagattcgatgtgatgtttttaagaaaaagtttttgggaactaaacagggcctaggtttccaaccccttttcctcgtattccgtacacacgttttttaaactgttaaacggtgtgtttttatgcaaaaagtttctatatgaatgtttcttaaaaaaaattatattgatccattttttttaaaaaaatagctaatatttaattaatcacgcgctaatacctagggcatgggttaacaacctctatacacgaacaaagcctaaatggttagtcttgtgattgtccagactaatggaattttcctatagctataggcctcaagtgttagaacacacacataaatagataaaaagacaaatataccctaaaaatttatatgcaggatatttgggaggaagatcagatgaatttacaccattagatcaaatatactggtagtatatactagcagtagaatgtaccgtaaaagtcctcttatatataatgtgtagtgcaataggaagtgtgtctggtggctaacttagtgcttgat

SEQ ID NO: 52143 - DNA, 1519 bp, Oryza sativa
tttaaaaaataataagatagataaatcatattcaatttatacaagtaaaaaaaattgactgcacgtgaatagtgttcgtgtgagtactatttgcagtcactaatgagttatataccggccaaaaatatttcaagaatgtgatataccactaattagacgatttaggctgtgttcatgtgttatggttggaaacttctttcttctggacaagtagcaactcattccgtataattagttaagtattagtttaaaattaacttaaaactagattaacgtaatttttaaaaacaacttttctacagatgttttataaaaagaataatatttaacagtttagaaaggatgtgcgggaagatagacttaataatgcagccttaaaaccgtgggtaatacggactatggactatggtaattaaaagcaccttgtgttcttcacgcaacacgtgttcatacttacatatgcagtcatttccaaaggtcaaaagtccagaactatgccgttgaaattcggtgcattccgcgggccagcagagcacacacacaactcaactccgccatgcttgctggctgcggatcagatagccaagttgcaagcccagattgactactgcgatagtttcttgcataggtcagcttttcacacggcttttgtcttggcgtcggcatggttcacaagttctctggaagaagaagaagaagaagcagatgcttcctgcttctgctgctgctgcagctttcagatagatagattccagatggtccggtcagcaaatgccaaagtcgcaggccccggtgagaaaatgttgatagctgggttttgttcagagtagctagctgttgttcggacttcagactttcagaatctgtgaagagagttgtgattcttccacggaataagttcactttaggtgtcgtaggctgtatttagtttctggaattgaagagaagtttgggaaaagttgatagtttagaaaaaaaagttagaagtttatgtgtgtaggaaagttttggatgtgatatgatgtgatggaaagttgggagttggggagaagtttggtgtgaactaaacacacccttaatttattgcctaatttaattttcgtccttgatccgaaaatccagatacaaccatccctcaatttataaaaccgtgcaaacgagatccctcgataatattgtctccagttttggctaacgtggtgtctttgattagatctttgtccaacatagcattgatgtcattgatgtaacgtttacatggcagtttgatccaaaaaaagaacaaaattaaaaactaaaagaataaaacaaaatatgtgggatccgtcgttagccaaaaaaaaaatagtgggacccaaatgtcttccaatactcttcacctctcgattttgctatatatttgtcgacaaattttctcccaaaaattttacagatgtaattacagtacaatcgtagtgtaattacactgtaacttgtatgtaattacactgtaactatagtgtaacttgtatgtaacttt

SEQ ID NO: 52144 - DNA, 1988 bp, Oryza sativa
tcaattcatggggattttagaggattttatacatgaggtcatacctcatgttaatgacctcatggaaaactttcctttggtctatctctctccaaattcttatactttcatatggaacatttgaacaacaatattcgcacaattcttgtattttcaatttataaaataaactagatatgccatctcgattcctacgtttttagggcccctttgatgaatcgcaggattaggaaaacatacgattttgattggaatgtaagtgtaaaacagaggattgtaaaacatagtaaaaacacattaatgaccgtttgattgaaccgtaggacaaacacatgaattggatgagagagatggactcaaaggaacgctaccaagagattgaagctcttggtaaattacctccaaaatctctttaggattctccattccataaggatttcaaaggattaggccccctttgaatcacaggaatgaaaaaacgggggaataggaaaaacataggattctgataggaatacaagtgtaaaacagaggattgcaaaacacaggaaaaacataggaatgaccgtttgattgacccgcaggaaaaacacaggaatttgaggagagagaaagactcaaaagatttttaacatgaggtagaacctcatgttaaatttccttcaaaatttgcatgggaagaggcattccataggaattttataggattccataggattcattcctttgattcaaagggctatataggaaaaattcctataggaattaaatcctttaaaattcctatgaatttcctttgaatcaaagggggccttagataggattcaatcctttgtttcaaagggctttataggaaattttcctataggattgaaatcctcccaaattcttatgttttttctgcaaatcaaatgggccctgaatcgtagtaataaaaaaacgggggaatatgaaaaatataggattctaataggaatgcaagtgcaaaacagaagattgcaaaacgtaggaaaacacaggaataaccgtttgattgaactgcaggaaaaacacaagaattggataagagagatagactcaaaggaaagtttccaagaggtcggagttcttgctaaatttcctccaaaatctctataggattgtccattccatagaaattttcaaaggatactatgggaatcctttgcttcaaatggcttcataggaaatttttctataggattgaaatccttcaaaattcctatgattttccaccaaatcaaaggggcccttactgtttctatgttttttaattcctgcgtttgaaaggagcccaaacatgagctccaaccccatgtttttatttccttggaaaattacaaagcaatttctcactactctcactgaatctaaaggctcatttggaacacatgattcttaaacacactataatcgtaaaaaaacaaacataattgtactaccctagcatctcaaatcgtatgaattaataaagcatgagagaactacagaaatgattgtttagatgaaacacagaaaaacaatagaaatcagaagagaggtaaactaagtattatttttcaacaggttggacctcatgttaaaacttatctagaatccccatgttcatttttttgccaaaccaaaactagactagcatttggttataggcagggcaggctagctagaacgggtgatagtatatactccgtatcattgagccattgccattgctagtcgctgtttgtttgcgtatgattgagccattgcggcattgccaatctctgtttgtttgttacgttcgtgcagtggcatgctagcttgtcagtacatatactagctagctagtagcttccaagtatatatggatgggctccatttctttctccttgattcatggtcatggcctaacttcctctggtttttcgttcaacctgcttccgttcttttccgattgttaatactccctccatcctaaaatgtttgacgcc

SEQ ID NO: 52145 - DNA, 2763 bp, Oryza sativa
attcatcaccccgcattggcttaatattttagacatgtatgttgagctaaacattaaactaaatcattgcttctaataatagaaaataaatctaaattatttaatttataatagattttggagtaaaatatggctcgccacgattaaatcaaccaaccaaaccataacgttcctaacatttagcatgcgatacatatcctaagtttcaatcctaaaatgtcaagagtttactccttccgtttcaaaaaatatataaattttttttatcagaactgacacattttagtactatgaatttggataaatagtttgtccaagttcgtagtactatgatgtgttatatttaaccaaaatcctttatattttgagacaaagaaagtacatgggatacaattattttgtcccttattaacaactctgtagtagcattgttactctatccgttttaaaatatatcaagctagtataagatgagatacattttgaatctgaggatacaatgaatatgttactattttaagaggaagatagtagtacgcaggagtacttcaactacttctgttctacgaggtggattccagctctccctgtcgcaatctaaaggagccctttgtagtttgtacaggtcaggcctgcactctgcatgcagtgacaagcaagccagaactcttcattcagtattcactggtctctgctccctccccatgcagatgtgcccatgtcgatcttgatcgtccggttgcaaactctttgtcggactggccagcttcttgtcgctcctacgttttctaatctttcagaagccgtcagtctctctcctgtttcctatgaagcttgtgtcagcttgcacatcgttgttaggtatacttaatttagtttcagtattgctgctgctgtctctgcaggcgcagccatgctgtgaattgccgattgctgccttgctggtgtgcgagtctgaagcttatcttgatgcaatgcaagcctgttgtttcttgtgagatactagctgaaaagactttgattaattgagcagcaggagccaggcattattaagaggtgagtgagtccatgcatgtgacattccaagatctcacgcattaccgggagcgatatatagtttaacattcagagttgacaattttcagtcagggtcttgtcagataagatcgaccttcaacgcctacccaccaagcagatatactcccattgcatctgaatcctaggcagcgatgatagttcaccacaaatcttggctttatcatgcaaatgctgaacctgtaatgcagtaattcgttggaatgagcagaaagctagcacattattatggttcatgatcagcaatacgttgcgatgcaaaaatgtcattagcagcagcactgcatgcaggcataagaatctgcaataattttcgcaaggacatgagatcgatcgatggagagtggggctggggctatcccagcggaaagaggagcctcggctcgagatataattaagtggcgttgcatagcttttgcagagcagcaatgcctttgctttgtctgaggattcagtacagggctacctgtagccacaaactgtttactagttaggtgaccacactaatcgaacaaaccaagcaacaacaaaatacttctagttttaaaaagaaaaaaaattgttaatctcctcctactaatctatctgcatactgtcagagataactaacatgattaaattagcaggcaaaaatcattatcttaaacaaaattagcaggcaaaattctgcagcagattgctgaaaccctggggtttgctgctgcatttcaacctgcattttcgtttggaacacttgactgcaagcgacagaaaggcaaccgtggggtcggtcagcttcattagcggacgagcatttgaggagaccgtgcgccatgattgcaggcacaagctttgccatcgccaaactttaatttaatccctctctttctttctcttgtctgtctctctgcttaattagcgacctggattagtgtttctttcgctgcacgcacgtacgtattttctgtagatgaatccctgcacaagtgtttaatcagtttgttttaatttttgtgtttctttctcgctgttgttccatgtgtgatcatcatatgtggcatcttcctttaatcatgagaagagaagagaacagagcactgcgttcttgagctgagaacttctcatttcatcgcacatgtacgttaattttgggttactttgggctgcttgtctgaactttctgaaccatccggagctgtccggtctgattactggctggtcgaaccgtccatctttaatcgttactatttctgagttgtactgaagattataaaaaaaatgtgtattcattagtagatcgacgacaatgctaatgaagtaatgatcggtgttcagtaacccaccagcctaactaatttggccaaggaaaaaaaattctctttagtttagcagacgtggcaaaattaattaggagtagcagctagcgcaggtgaatgcacacgttgggctagccctatacgaaatatacaaacacgaaatgaagtctaatgaagattgaaaaattatgacatactccctccgtctctaaatataagagattgtactagaatatatcacatccaaccaaaatctcttatatttagagacggaggaaatatacaaacaaaaaaatcattagatatttttaattaagtttaattattgtaaacttaaaaatgaatttatataatattttaaaattaattttta

SEQ ID NO: 52146 - DNA, 2279 bp, Oryza sativa
  unsure (1)..(2279): unsure at all n locations
cagtgaaggcaaacagttttaagcagtaattactgggtggtgaagtgaagagtaagactgaaagcagggacctaatggaggcaggggcttttgggcatgcaaaggtcagaatgctaatcactacaactagtagcaagcaaagcacatttgtgaattatgatcactagggtgatggggctctactctgcctgattggattaacagtggtggcttttctgggcatcagagggcactagctaatctagtgttgtggcaccagatcttgtctgcctgatgatactggtgtaaagtactccctccgtactcgtaaaggaagtcattttgaacagcgatacggtctccaaaacacaactttgactttttgtttctataaaaatatttattgaaaagtgatatatgtatacttttatgaaagtatttttcaagacaaatctatttatataactttttacattttcaaactcaacaatttgagagttattcatgatttatattcctaaggtttgacttaaacattgtcctaaacgacttcctttacgggtacggagggagtagagagtgtaatgaagcatagcacacatgcaacaaggagaggattagaaaaggagagaacactgaattatttgtgtagttgcatctctttttgcagagagataaaataaaagctgttttggcaatgtgggggaggatgtatctttgacctttgcttggccaagtggaattggggggtcaaaccaagtcagtctggtccaggaaacagagcagatagacatggtctttgagtcttcaagattggacagcactataattcctatttgtccatgcactgaacctgaattatgaaagccttgatcacagaaaagccttaattgtgaagccctgaaggctaaaaatgtaatgttatgctgccaatgtaaagctttcttgtgtaagataattacatgaaacattcttgtccctgcagtgaaggaaaaacaactgtggtccagatgagtgaatcagtgaagcacctagcttttggggagtaaaagtttcagtaattgatacttattaaatcatatcttcatgggcaatcatggaggcagtaaaataatgatcaacgggtcacatttgtgcagtatgcataatggtgaaaataacaaagccactacttaccaatcatggatcataatatttgcaatttgcaaatgtttaagcctccactctgagagcacctggttccatcagagctgacaactcctgatgtgtcaccttgcctttgcccaggccatcaacagcaatcaatcctacttacaaagcataggtcaaattaacttgtggttactagttagccaatgacaaagtacttttactggtcaatggctatctggttatccagtgacaaagtacttttacttgtcaattaggcaatagctaagaagaactactgagaatgaatggactagtccagaagatctataaaggagaagtaattgaagggatattctagcatctgttggctgtggcttaaggaatgtttgccacaagcacattgcactaagaccctgttcagctgttctgtctgagatgatgctgcttgatatctacgtgtaagtcattaggtcatcatctttccaagttgtccctaaaacctatctaactatctgctttattatgctctagtatagcccttgtaacctctgcatttattttgtgtgctctttttgtttatttgtggggatatgtaacctctgaaagttatagggggggactgaaatgtttcagaactacaggttaatcaggtacagcttgcaaatacctatccgaatagtaggaggaaaaccaggatctgagagagccccacgaaattataagacaatgctaaacaagttcaacagcatgaaatgccttgtattgcatctgaagagggaagaagttgatactgggattactgtaacatgaatgccttttagaagcaactgaggaagatcatacttaaaatacaacctcaccgattcataaatttgcatatcactgtttgtgcaccaccaactcttctatctccaaatgcgattactttcgataaaaagtttttgtaaaactaaagcaatggtgacctttgtaagtgacttcgaatcacatcctagatttttcacattttggtccttttaaaaaacttatttcgcaagtagatctctagaaaaacttatcccaaaaatggtcctttttagggcgccagagtggctggcnccnnccttgaacaacagctccagcctctttggcgccgtcccaccgccaac

SEQ ID NO: 52147 - DNA, 963 bp, Oryza sativa
aaaaattttgtaaaaggggttcatgtgcagcattgtaagagtttcatcaattggcatgcacattaaatttgtagttactaatccaacatggacatacctaattacatatgcaaaaacctctgaataaataaacagtcaataaatattggcacatgcctaagttgacactggcaaaccaattgcaatttgctttcattaaaaaagggtcaagagcaagctactgataaaaaatgccaccttcttatccctgtaaacaaaaacatgtgatgctcaattgcatacagcgcgtgcttactgctacagtgtgttgtctgtcagtgctcgcgtatgcaacctcatcccaatcataaaattcgattccacgacgaatgttgtggaaattgagcacatagcgcttgtgtaatcttacacgttgcgcgagtgaacttttaaccattccttataagtataggtggcaatcaaattaagcaacaaaaatgaagcatgccgatgatgtccaattcgattacgcacgaaagaatcgcgcgattaccacctgattgaaggttcccctgttcggttcacgagtacacgacgaggcatttgcagagcagagccgaattttgtgaaggcgtcatttacttcataatttcttttagaaaaaaaaaatgtaacatcacaagacgacaacctgaatgtcacgatctggacagcaacagcaaagggcagcgccaatccgcccccaaatcgccgcgcccacacgcacacgtcacccagatcggggccgccgcgaaccagatcgggggggagggagaaggaggtcgggtagtagcaggggagggaggggggcggggcgtacataccaaggtggtgcttggtgcgctcgacgaggttgcggcggtagagcgcgaggacgctggccatggcggcctcccgctccccggtctcctcgtcgtccgcgtcgggctccttcaccgcgaacga

SEQ ID NO: 52148 - DNA, 523 bp, Oryza sativa
aatcgtggtcgaccacaaatccaactgtccatttttttcattaaaaaaaaatcaccaaatccggatcttagcgataagccccacacgtacgcgccatgcatgtcagggcaagcaaaacgagagagcccctctctttctctgtaaaaaaaaacccaaaaaaatgaaaaagaaaaaaagcaggccacgtggcacctgtcgggctcagaccgactcgcaccgatgcaccgaccctcctccgtgacaaacgcccaccgacacggcgggccggccttcacctgggccccacacgtcagcgtcgttgtgtagaaggtgaaagcctcgtgcgatccgagcccgagccgaggcggctacagtgtgacgacgcgattttatcgcggagctcctataaataggcccccgcgaaaccctcgtaacccctcttctactatctctctctctcctccggccgcggctgctcccccccccccctttcgtcccccaaaatctccgcgcctccgagaagattccaccggcggcggacgac

SEQ ID NO: 52149 - DNA, 1587 bp, Oryza sativa
ccagtaagcagtatcgccctgctctacggcttcgcttgcaatttgcaatactgtggtgtcttttttttgttttgttttgtcgcgacaagtcagtagcgcgctgtagcggagtaaactactacagtagtatctcttcggcccacatgtctgacaggtgggcccggcggggtgtgcgggccatggaaaaggggaaaatatcgagattcctgaatccggtggtggggccgagcccgtgggaggcgaggccgccaccacgaccacgcagccagcgtgggaatcttctgggcccacctctggtcacgccacggacgcgcctcgtccacgtgacgtggcgccaagcgtgtggggtttgcttttgccgttgcccgttcacgcgcgccaacggctgcctcctcatgtctgtctttccctgtcttcctctatggtggggcactgctcttctacctacctactccctccgttttttaaaaaaaattcctaatattccaatgtaaatttaatagtgagtaaaaatgactaaaatacccccttattattaaataaaatagtaatagtgatagataggtaaagggtatttaagagataaaacttcttatttaatgtgcagacagtaggtaagatggtgaaagttgtttcctgtgagacaaaattcaaaccacataagttgagtattttttggatgggggaatgctccatccgttcgcggtacttcatccgttctaaaatgctaaatcaaactggataaattttaacaaatattacactagcaatatagttttgttaagtattacgtatattatatcattatatttgtattttaaaatacttttatgtgatattaatttttttagttgtttaataacatactataaaataaagtagtgatcaaagtatattagtaaaggccgtgtaaaaactatatgccttacaatttagaatgaatggagtataatacaaaagattatgtcattttctgtatattaagaaagtaacaacatttaatagttcaaaagaaaataggtaagagggtataaatgggaaataaaataatacaaagaagttgatatgtgaataaaataggtaaaatttgcttcagaacgctcaaagtttatgatttttattgtataatacccaaatagcttgtatttgttataggaatcacgaaaatatggtaattagctgttagacactgagcgtattgctttattgtatccggtccaaatggagagaatctttcaagaaagacaagtttgcccatagtgtatctttctttataaaccgatcaggtttagttcgctaacaactacaccagtgagaatgactgcatcgaggaagtgggaatggactgagcctggttcgaatgagaccgagccatcttacaagccgatggacacaagggcaaatatgtacttttcgtactgtttatctctctattgcaccggatataataaaataatgcattcacgcatccaacaattaattaccatgctttcatggtattctacagtaaatacatgttatttaggtgtcttgcaacgaaaatcgtgaactttgagtgctgctccctccgtcccataatataaggga

SEQ ID NO: 52150 - DNA, 1931 bp, Oryza sativa
tcgcataacgaaaattgtgctgtgatagtgctatttaaactatggtttatgcaatttgggcggtgactcgcatgatgcgtacgtagcacgtcgctagtgttcccatttggggtgagatagatttaatttgttgtccaggcttgctgaatgcagtcaactccctcatgcatgggttgtttttttttttttttatagaagtagggaaacagaatttgtgcatgagaagttgcctggacgtcctgttcctaaacggaaactaaggctctgtttattccaactttttttaaaaaaacttttaacttttttatcacatcgaactttcctatacacataaactttcaactttttcgttacatcgttccaatttcttcaatcttctaattttggcgtggaataaacgcaacctaaagtataaactttcagcttttccgttacatcgttctaatttcttcaatcttctaatttggcgtggaataaacgcaacctaaagtagtagttgaacgttctgacaacgagggcccatttttagcaagctttataaatatagctatggattatttgcttcacgtttctaaaaaaaaatatttttgtaaagaacctttatgtatcgtattaattagaccatatgttctaaattatttattaattattaaatttatttctaaaaatatgtattattattttactaaaataatctagcgaataagaagttttaaacaggcctcatatgcatgcgagggatcatgaatttcaaggggagagagaagaaatctgtttaactagaagcagattaatcactagtactactcatttcatcccaaaatataagactcaaccatccctaacataaagatcaaggaaaaaaattaatcaccttctttattgaatcatattcatacatactcccttcgtcccctaatataatggatttagacattttgcttgtactgtttgaccactcgtcttattcaaaaaatttgtgcaaatataaacaacgaaaagttgtgcttaaagtactttggataacaaagtaagtaaaaaataattttaaattttttaaataagatgaatggtaaaacagtgtaaacaaaatgtcaaaatcccttatattagagagcggagggagtacaagcaatggagcccatcgtttcgaaataagcgaaacgacatatttacaaacgaaaaatgatttgtgaataaaacttttatatacgtgttcttagcgatttaaaagcaaatgctgaaaaacaaacttcgatgaaaaaacccaaaatcaactccaaatttaaggttgaaaattcaaattttagctgataagcataagcataagcgaaaagatgaggccaattgggggggtctgatggtaaaggatttaaaataaaccaaatttaaatgattaagaagtgatagttaatgtatgcatgtatgcacgtcttatattatgagacatgagagaaaagtggttgtgtattatattttgggacagagggagtagtagagcatcaccaagagtatcccaataatcaattcctaaaactatatattttggatcttcaaaactgaatataggaagtgagaaaacctatctccaagagaaagcctaaaattgatttcctataatgaaaaataggctctccctttaactaccaagtaccaacggacaaaattaatttttctcttcctccttcattttgttaattttctctgtgcgcgcgcgagagagcgattgggaaaaaaaatcgctcccttgagcgggaatgacatatccagagttgggaatctggattattggaagacatgctagggattctgttggatgcgacttttaaccaaaattttctaaatttaaggatagggaatagaataagaaagctactggtgatgctcacccttaatttgttgagtactccctccgtattttaatgtatgac

SEQ ID NO: 52151 - DNA, 6580 bp, Oryza sativa
tatgtaattataatttattttattgtgacttgatttattattaaatgttctttaaacatgacataagtatttttttatttgcataaaaattttgaataagacgagtggtcaaacgttggttaaaaagtcaacggcgtcatacattaaaatacggagggtatattatacagcacgtatatacgtagaatggagcatgcatatggtacgtacgtataataccggtggatgtgaagtacgtactggtagcgtaaatgatggggactagccctagtccagccgttaatcggttgtttttagtggagagtcgatggcgcgtaagtaggtacgtaattagagcaggtacagtagcatactattaactagctataaatatattttaatgtgataaacaatgagagagaaaagtagcgggctacatatctgtagctagctgcagcacggactccaaaacacaatatatgtataatatgtgggaccatatattaatagcaactattgtatcaattggctattagattggttatagatgaccagtagtgggctatactattaaacttgctctttatgggggtgcattagagcaggtacaatagcaggctattagccggctataaacatattttaatgatataaacgatgagagagaagagcagcaggctacagatctgtagccagctgcagcacggactccaagacacactgtgtgtataacaggtggggccatatactaatagtatagtaaacaactattgtatgaattggctattagattggctataaatgaatggagctggtagtaggctgtactataagacttgctcttagccattagcaacagtgaacagggatcgaggtcggccaacgccaagctggaagaggacgttagctggtgccaccgcccccgcccgccgcccaagtacgcaggcacgcgccgtgtggcgccgtttactcgatcgtatatacgctgatacgcgcagacagctcagggagtgtactccaatatacgtctacgtctacgtctacgcgggggatttgactgcgcctggccccccgcggtaaaacacaaccatttggctgcgcctgtgcctgcgcctgcgcgcgcggaagtttctagacttgctacgaccactacacgacgccgtttgcctacgtggatccagtccgagacgcccgcggccggaagcaactgccaacggccaactggcacatggtagtaacggtttttctcggcattgtttttcccgttgccagttgtttttgctgccactggaggcgagatgagagatactgaaattcccttctcattttcttcacctgtttaattataccctctcgttaagaccatgttcttttttctctttaattaacatagtagtatactactagtccttacctcaatttttattagcatgtttttcaaactgctaaacggtgtgtttggtacgaaagctatatatacgaaagtcgctttaaaatataaatctattttccaagtttgtaataatgaaaactcaattaattttatactgatggcattcttgtttttcgtacctcaactttatcttcatcttcatactactcactccatctcaaattatacaacaacaaccttatctttagaaaaaccaaacttggtaacttttaactaataattacgctagcaagccaaaatctacatcaagtattgtgtatgttatattattattcgcaggggtgtgcttggacctgtgcgggctgtgctactgaacatggcccccaaattttaagggcccctaaaatattaagtatgtcccatatataataatattagaggctttaattttattaatttgcagtctaaatagtagtaaaacaaggcccaaaacgttgcagaaggtgaaccgatccatcttccatcgtactcccgtccaggcatcagcgtcgtcgcgtatcgccgaagtcccgacaccgcagccgcttcgtctcctctccccaatcccctccggcctccgcttctacttcatcgctgatgatcggctgatcgccacgcccgttttaaattttactataaaaaatttactaggctactaggaccccattttaatattttatatgggaacccgatttgaccgggacgcccctgattattcgtattttaaaatgttttcatgtgatatatactaaatttatacatcctgatgatacaatataaaatgaattaataatcaaaatataccattgaatatcgtataaaaaaatatatacttataatttagtaaagaggagtagaattttagatggaccggttttggtgccttggccccgttggcaatagtcaatttgcatactacagtactctccagtctccagcgatgttgcttaacgaaattgtgctgtgatagctctagttaaactttggtttatgcaatttgggcggtgacttgcatgatgcgtacgtaccacgtcgctagtgttcccatttgggtttttgttgtcttcgtcttgctgaatatagttgttcttttttttagaagtagtgaaacaaattaaattgcacaactatataatcaaacacatatataatgcgtgtgaagttgcctaggcgtcctgctcctaaacgcaaactaaagtggtaggtgaaaactctgaccacggtttcttttttttttaagaaaaaaaagcaaacttcattatagaaattaatactagattatttgctctacgcttctaaaaaatattttttaaaaaagctatcttgtactccctccgtcccaaaaaaaggcaaaccctggatttccgtgtccaacttcgactgtccgtcttatatgaaatctttttataattcatattttcattattgttagatgataaaatatgattaatattctatgcgtgacttgtctttttaatttttttcataattttttcaaataagacggacggtcaaatgttgggcacggaaaccagggtttgtctttttttttgggacggagggagtattgtattagttagactatatgttctgaattatttattaagtttatttctaaaaatatttattacatttatctcactaaaataatcaagtgagtaatcagttttaaatcacagaccctagatcatttgcgtagggtcatgaatttcaaaggggacacagaagaaaaaactgttgaactagatgagtctagaagcatattattactcattaatttgtttgttaacccctccagagaagacggctagctcagacctggtgagaagctaattaagcaatcggcggccttgtggacttattaccggcccggcgatttgttgactttatcgtgtacagaatgtacagtggaccatgcatatggtaccgtaatattgatcgatgacgaagtagcgtaatcgatggggactagctagctagtccagccgttaatcggttgtttttactccaaccgatcgatcgatcgatcggttttgacccgcacgcccggcccggccagtcgatcgagatgtacgtggagagtccacggcgcgtacgtacgctacgtacgtatcgggcggcgtcaaggtcggtgtagcaacgtacgcatgcatgcggccaaacgccaagctggcgccaccgcccacgcaggcaaaacgccgtgccgtttaataggatagccgactactatctccaaatcatcttatataatagttacttactatacaattaatatttggtcctacctacaatacacatagtacgtcttaaaatccgtgctacagctggctacagatctgtatcccgctgttctcctctcttttatcttatctctttaaaatatatttatagatggattatagtctgctactgtacctgctctcagtgtctccaaatacgtgtactactagtacgcgactacgcgggggcgggatttgactgcggctggccccgcggtgaaggtgagaagcatctatctatcgccgtcgatatccaacgcttggctagctagctgcgacgttaaccgtggccacctacctgaatgcttctcttcgaacgtccgaagcaagttgaaaaatcggatagcatcctctgacacatatacacatctctaaccatataacatgcacctttaacgatatttaaaacgaattttctcttaaattatttatctaatgtacaatccgatcacaccgttgtattcgttgtaattaaatctttacaacaagatgtctcatgattatatttcgataaaaaataatcatatgtttcaatccattaacacttttttgttttataggtgatagggacatgtttcaatatgtgtcttcagcgtgtttcacaaaattcacaaaataactgttactactctctctcctctctctctctccaccacatgcatgatgcatgcattttagctagtttcaaaacgatttttctcttaaactaattattcaatctacgattcgatcacaccgttgtattctttgtaattaaatctttacaacaagatatcacatgattatattttgatgaaagaaaaacatatgtttcaatccattaacattggttgttttatttgtgatagcgatatgttttaacgtgtatcttcatcatgtttcataatttttttaaatgtttcagttgctgattttttgtttcaccctatataacttgatgtttcactcgttagttaactggaacatttaactgactgattctttttttgcatgctgcatacgtaggtggtgtaatgacgtgtaaacagttgggcgtccgatattcggtggaatatcggagttccgaagcagagtcgtctccctacctgctgtgtgttggtcgatcgatcggcgcgcgcggaagtttctagatcttgactagcgctacgcgacgccgttttgttccgtatccctcccgaaggtacgtacgtacgtcgtcgtccaggtacagagtcgatcgactcctacgcggatcgagtccgagacgggcggctggaagctagctagctagtgccagctgccaactggcaaaactggcacgtactctagcttacgtgtgatgctcgcggctccaacgcagctcgctccatcggggtcacgccactgtttgcctccgccgcgctcttggatatttttctctctcattctctgcctacttaaactaaaatatatagcaatctacactgattaaacatatagtaataaaatgtattacatctgttatattctaaaacacgaaagtagctagctaaccccgtgacggagccaaaatgtactcaagagtaaggctgaactactataatctacataaatttgtcttttatttttcaatttttgaagtataatttctatggatatttgggcataagagtaagactctactcctatatatccgccccttagctaactatcgcgtctctacaattgttacgttaatgatttttttccccaagactaataatgttgctacgatatgctatactgagtgtacacgtacactgcattcgcacaagtggaaccaggatttttctaagtctaagactcaactaatgtataatttacatagttttgttttttgaagttttaaagtactacaattctaatggattaaagtagaagattagaattgttattcctgtctccgctcctgattcgcattacttcatcaccccatatctactactacttaaaaaataagaggtgcttccatcgtccgtcaaaaaaaccgggtgaaaaaaaaaccggaacgaatccgattcatcaacgcggtaaaagaaaaatcgggaaaaaaaaagaatatgtccgattccacgaaaataggaaacaaactcccatctgttataccaagtcctattcggttagcatcaccaggagaaccgacaccattcacagagagagagaaagagacgacgccgccacctctcccgcccccgtcggaccgcagccgcctccatgccgccgaatctggcggaggcgaggtccggcccgccgcccctcccacccccgccgggctgcagctgcctccacaccgccggatctggcggaggcgaggcccgaccggcgttccatgacgtccgccaccaccaccactgccgcacctccccaccatgcacagagagagagaaagagacgacgccgccgcctctcctgccctcgccggaccacagccgcttccatgccgccagatctggcggaggcgaggtccgggccgccgcccctcccgctcccgccgggccgcagccgcctccacgccgccgttgttcggggagagggcgccgcgccgttggttgtgggggagggcgccgccgccgccgctcgcgggaagaggggcgccgtcgccgccgctcgggggcgcggaggggagggcggcgatgtgagatgggagggagggaaatgggctagggtttcggcggctgaggagaaggaggggttttgtttccccgatatcgacgctcggccgtccgatcaaaaccctaaagatcggacgatcggtgtcgtccaggccgaaatcagcccaagagggatcgagagtgaggccacttttctggcccaagcccaggttgtggcctggggaggggaagtgcacttgcgcgtgcacaaaaggccgtggaccgaccggcaagggccggaa

SEQ ID NO: 52152 - DNA, 1542 bp, Oryza sativa
caacactttgggtcaatatacacactccgtattcacccggtgcaacgcacgggcacttttgctagtctaaccaaaattaaactaatcatgcatgccgtcgaagcactgtacacatttagataaaacataatttatcactcaccaactacgactttaaatcatttcgagagctgtacagtagttagctttgacctcttcaattattttgttgagaaaaggaaaaaaaaggagatcgaagctgtgacggacagcgcgataatttgcatatattgtgtgcatgctgtgcgcttttggttgagttgctccatcccacgaacgactgtacttcggttcggtccaaccaaatctattcttatgtcttctcctccacagctatatattgtaaaccaccaatctcggccggcctccttgtattgtcaaccccaaattaaaattagtcaatcgatcagtaacccggccggccaatcccaaccacaacgaagtgattaatttattagcttcctttagtactccatccagccactattataagaaaaaggagttatatatatgatatgctatggttaggaaaaaaaactttgctagttccaaatcaaagttaactaaaagttaaaggagtatgtttttttggcgagaaattttaataaggtttggttacaatacagtgggaacatgcttttgcgaccaaccacatgaaaagaaaaaggttaatggaaacgaccgaaagctagcagcactggggacctagaaggctagaactcgatcgatcgacgcaggtcagaactcagaacaacctttttaatgtcttttgtttgggaatacacaagacattgatcaaagggctggtgctgctcttttatctcatactatgttagtcaaattcttatcctaacaaagataaatacattctacttatattttaaaatggagagactccaaattagagacattgatacaagggctagggctaattcattgctatttaatttaataaagtcaatttttgtagtttaataaggaatgcacgaatgttgtcttaattagatattagttaatatcctaatatattaaaatttggaaactttggatttatatatatcgttttagaaaatgttgctttcttcaaattagtattacatcttcgaaatagtgtgtatctacatctggaattatcatttaaaatcttaaatatgtgctcaaatctgtacaattcaaattttaatacaatagtattagtgtttagaccatctccacttaaatgatcatggaatattcagaatatttcgaaatatgctgcaatttatcctttccatttcaaaatatgggacgtattttgttttgtaaggttaaggcttaaactaaaattgattccttatttatatacttatatgatacaaaagtataatcatgcaaaattacttttgaagacgaatacaataacattaattttacttctcaaaaattatattataatagagtaattgtttatcaaagtcttgttctaacaaaataaaatacgctttactctattatataatataa

SEQ ID NO: 52153 - DNA, 929 bp, Oryza sativa
cgtagagatttttgaaagttatatacaagttacattatagttacagtataattacatgcaagttacaatataattacactacgattgtattgtaattacatctgtcaaatttttgagagaaaatttatcgacaaatatatagtaaaatcgaaaccagatataactagtcccccaacttacaaaactagtgcaaacgaggtccatctgcggtttggatggtggttttggctgacgtgacgcatacgtaactagtttgacttggtcctcatcctacgtaacggtgatgtggcgctagagcaaaatataaaaattaaaacaaaaaatgtggaactcacatgtcagtcagatctggagggaaagaagagcggcctctccgctctcaccacgcgtcgcgtgccactcctctcacgctgctcgccgcgcccgctgtcctcgttgcgttcctctccctcttgatctgctgccatcggcgttcttggagcccgcaagccacaggtggccggctgtcacccgcttggatgacgcagccgtgggagcgggggaggatggaagagtcccatctggtttttgggtgcaaggacgaaaataagactgggctacaaattgaaggatctcaagtgaacttattccttctaaggttcttccactatactaaggtttttggaccaacaacaaaccgaaggcccaatacaataatgtttgacatgcagtgcctttatgggctataattagttgggctgatgtaatattcaggccaataaattaactcgagcttcctgtaaaaaaaaagaaaaaaaggaagaaactatttcacctacttgagctcccagttgctcgctttagctgttacatcaggctctctaccgataattgtttttccattcctttgtttataaaactattgaaaaaaaaactgccaacgagtagaa

SEQ ID NO: 52154 - DNA, 1578 bp, Oryza sativa
ctgtggtgtagaaaacaactgaacactttcaaccgtttgaaccaggtggttttgtggtgaaccagaattaaaccaagactggctggaccagctggtgtagaagagtcaagttattgcctcaaaggctcgctacaccatttttaacccaaaaatgcctcaaaatcgttggtggaggtttgatcccagactggcaagctacaccattccaagtggtttttgtgttgaaagtggaatatagaatatatcgtctttgactgaacgacgggccaaacatccaatcggacggtcagacaacttgaccatggaaccgaaagctcagccggttggctcaccagagggaacttcgatggtcgaagcaagaacacagctatgtttcttcgctaaaggaaattaataatcaaacacagagtagacttctcaatgttaatggaaactaaaaattggaaaaggaaatccatataagccccatcaaatgcaagtgcacttctcaaattctgactacacaaaggtttaatctaccacaactattaagacagtaaagaaataacaaacacttacagggcgtggtagtattctttgcctgtggccttcaataacaaaatccctaattgcctctttgcagttcctgcactttaaaagtcaaactgttcaaactttggtggaggcaagttatttgggaatgcagtcttcacatattttgcataccttaatccttcaactggctcccatgtgtcatgatgagggccataacccttccaacggacctacatgcatgataaatcaacccattaacttagcataaaacagtaaaaacaatgaacacgaacaaagaaaagggcagtgcaaccatggattgaccatttgtaattttttttcttttcttttgtacataaaccttgaaattaatatctaccatgggggcttcctccactgtgctttcttcaaaaaaagaaatgggcagtgcatgatctatggaaataaatagataattacatgatatgcaaataatataacatcaaatgatcaaaaagagcttgtaccaaggttaaggcaagaaaatgaacttatttaataacatgaatgcacaatccgaaattctccatacttaatatcaataagatttagcctacaattacatgaatgatagatagaatcaaagacattcatcatttcaacgagggctgagactcaaagttgaatccttatcttataatcactcctacacaattaagatgccattaacatagggattctttattactacgtcctgcagtgttaactgttaatgaagagtagtactttttgtttaactcttagcaattctatagacattatgctggactatggagttatattatttctttggttgctatggcatcgatcaatggtcaaagtattttactacattacacagttgttattaatggataacatatgttcctggtcacccgaatatttattcaaatgtccatttgtatttcagcagtctaaacaccttggcattcctagatgtaaaaacatatttcactacaaaagccatatcactcttgtgttcagctcctttataatagaaactac

SEQ ID NO: 52155 - DNA, 710 bp, Oryza sativa
caggtaggcagagatggcgtcgaacagcatgttccgttgcaatgtactcggacacagtgatctgctcgtaggggttgaagtaggacatcgccatgggaaccaagctactgatgatgtacctagcctcctcatggacgtgctccggcatcgggaccaaagcaagccgacgccagccatagctgacccgaaccctacccacttctccacagaaaacgccatgactgcgcggtgcagccactacgtactcgcctagtcgcctaattaagcgtatctagctacttacactgtagctcccttcaatggttgccgttgtggatgggcttgcttaccgttgcttctgtggcggtgtggcctcggcttatataattggcgattgtggcgcgcaaatgatccctgccgtttcatcgtggaacaggaaaaaggtgacaacgcgcctcgtcgaagtttcgtcgaaccaagcgcgatgatgcgatttggcttactccacaggaaaagtaagtagtagtagaaattgcaaggggctcaaagaaaccacgagaagggactatatcaccgcgttgggtttaactattaatgacccgagctgaaccggtgggctagaccacggcaccacccaccaaccactggtggagaaaccatctttcgtcggtcggccgatttccacaatagtcccggatgcaataaaaaccggggctaaagatgatttttag

SEQ ID NO: 52156 - DNA, 1209 bp, Oryza sativa
aaaaaattaaaaagacaagtcacgtataaaatattaatcatgttttatcatctaacaacaacgaaaatacgaattataaaaaaatttcatataagacggacagtcaaagttggacacggaaatccagggtttgcctttttttaggacggagggagtatctatctatctatcatacctctatacctatatactaattggacactttctaggagctctcacgttaataaaaaaaatctagccatctattatattatattatattatattatattatattatattatattatattatatactaaaagtccattaaacttcctataaacactctcatgccgccacgtgggactcctacaaatgctcctaggccgccacgtgactctgttaaatctaaccgtcgattttcacttaaattgatggacctgatattttagacttaaatttttccgtgaacctccccttccatcgatccccggtttccctcctttttctgatcctatttttatgctattgtttcacccaaaaaaaagacatgcgagtacatacgtgagtatagcacgatcagataaaccggaaagaacatactcctgtacgtacgtaatacatgatcagagaaacaccggaagaacacatatatatacttacacgtagtaacatatagaaatagatgaaacataatactctataaatttacataaatatcaccatcaattttcatttaaattggtggactcaattgatgttttacaacattaggttagatgtcttaaagcccattaaacttccaaaaatgctcctaattcgccaaacgcttctaagttgtcatctgatgctctaataaattagtgaaattcttaaaattctaaaataacaaaacatattttcattaaatttggtgaacccattatttacaagcattagattaattttcaagaaaaaattcctttcctaaactcgggcctaccaaagagctttgtatgtataagttaatttttttttacaaaaacgaatatacgtatgtacgcctcctcttacttcaattcatttatccacccacctattccttctcctatgttcatgccttattagttagataagcaataatatcgtgttaaacaattaagcttcttaatcatacaactaatttctgatcagcgtaaatctttagattatttataactcaatttacagttgaagaccatatttcact

SEQ ID NO: 52157 - DNA, 1843 bp, Oryza sativa
taaaaactaaaacactacaactcgggaattattacaattatatgcatgcataatctcctctcttcaactctctcttcctctcctcactcatttaattcctttgtctcctaatttttaactaagtaaaaacagatcaataattagaaagccaaatgattataattctaaagttgaatcataattttaacttatttgaatttttattttatttataattaaatagataatttaatatccatgttacccatatttcactctatagacaccgttcctttgcatggtaaccaaatagaaaaaatacaaaccataatacaaaatgaaaatgagtactatattatcgtaaatcattgtacatcctctgaacgcacttaaggcgtcacatgttacgccttaaataaaaataaaactttacaaattggaagaaaaatcatctgaccatcagtttccacttaaataggtagatctattattttcaaccaatagatatacatttaagaatgtcttaagccgcaatatgttatgtcttaaaaattggaataaaaaaaatgtgataaaaaatatatcaacggtttcacttaaatcatttagataaaatagaaaaatccacgcctccacttcgccctcccccagaacatacgcacaacacgacactactcgtcacatcccttctccactctatcccttcctgtttatacagccaaaaataatcaaaatattaaaaaaatgcataaatttcaagctcatctgatttctaatctaaatattattgtatttataattagaataatgatttaaagatccataaagcctatattttgaactgtataaaatataaaataaagcaggtaatagaaaatatcaatagggactaaattaaactattttgagaaaacgtgatacgttcataaaaaaattggttcttacatttcactaaaattggaccaaccattgcatgttccattttcgtaacaattttaaaatgcttagacattaatggccttacatctatcctatattattgcattatgagtttctccacatatttttacatatataaaccgcactaaggttcgcagtatatagttctttgaaaagttatatttgttactactaaatttaaaattttggattcatgttaactaggtatattcttttgaaaaagatagtataggtcacaacgaagcgaggtatatgacatgtctctattaatttatatataagtatgtaacaactcgcatcaacttaaacctactaaaaggagaactacttgatggtacaaataaaacatatttattaaaaatatagttctttagaatttgttaaaaaaagaacaaaacaccttacttctaatttacagttgatttgttagacacgttttccaaacaaactaaatcgaacttccttatatataataaagagattgtagataattatttatatagatgtatcaaatttgatatattttagaacctaacaaatatcttggaaaaattatcaaagcaaaatattgaagaacagcggaggcctcacctgatgtgtcttattcaaataaaaaaataaaaaagtacttttaaacatgggaggtgtcaaccaattgatattctgtttatatatatatatatatatatatatatatatatatatatatatatatatatatatatatatatatatatatatttcaaacgcaatgtacaaatcaaggttggaaatttcagaaatttcgatcatttcggacccctcagatatgatattattttggccgaatttttttaacttttcatgaattttggtaatatttgttcaaattcaactaaactatgttttcaaaatttcagaaatt

SEQ ID NO: 52158 - DNA, 663 bp, Oryza sativa
tcacagcaatgaactcaacctacacttgtctatcagattggtggaacaagtcaagtgcaatgacaccatgtgaaaacagaaagggagtattgggagctttgcttgttacgtggtggaatatccggcttgaaagaaacatgagggtcttccaggaccaacccaagaacaaggtggttttcttggtgatacaagacgtaaacgagctacccttagcgtttagtgctgataccctctaatgcggattttgatatgcaagttgctattcttggcgctgtagatatcctatttagtatgtactaaactagactctatttgttgcttcttctaatgtatttagctagcagatctcctgcctgctactttgaaaaaaaaaaaagaagataaacaaacatacaaaattagggattattgctccaataagtagggaatcagcaactaattgatattccactttaattctgtcagaattcattgtgctagatgaaggggaaaaaaaagacaaattgctcagattatttaacatgcttttgcggcccaatatatatatgaaacataattagttggcaccacgtcagataatctatcggatctggttcaaatttaatctttctagtatcctgttgtcattaacaggatttgtactgtgatggtctatagagtgta

SEQ ID NO: 52159 - DNA, 704 bp, Oryza sativa
aattcctgcaccccgtacaggcgcaatgtactcctccgtgccaacaaatgaattggatgctcgcataggttcagcaaaaaatatggggtaactcccgttttttctcccttttttctcatcagcatcttcgggaagaaagacctaccaaataacataaaaatacttattgtaacttgggatgataatgaacttattgacatacatgctgaagtgtacgatagattgaaaacaatattacactagtataataatatgtgctatcccttgaggattagtatactgttgttaaaaaaaaatacttaccacacgatgagcaaagcatgtttaatgagtaaaatgcaacgctagtaccgcaacttgtgaggtgggtgcaatttagtcacccatattgtaaaatgctcaaacaagccactcatcttgttttagggggtgcaaagcacataaaacatgtgccttgtgggttgttcgcaatgaagttatgctctatgttaatttgttttgcaaacatggtcacatgatccataaataagagaacgtgcaataccaccagtagtaaatccaattaaagatgaattttgttattgattgacaagcacaatatggtcgtgttcattgacagcgggagtagtagcatatacatggaaaaaaatgagtattagtttgtaactttaatgcttgccttgccaaatggctaaaaaaagcat

SEQ ID NO: 52160 - DNA, 3515 bp, Oryza sativa
ccgggactaaaaatcatctttagtcccggtttattcaatgtgacaggaaactaaacaggctgacagagtgaaaaatttttgtttgaaaactaaacaggatttttgccaagtaccatctcgtcattctatagctagtcaattagccgattcatatgacatttcaattgactagctatataaggacgagataagtttctatttgacaaatttattacgtataatcctgactgtttttaaacaaccattagaaataacctatactaatctctaacggttctgaatcgaagactttagagagatcacatggcatctctaatggttattgaccttcatggagaggccaacagtatgatatcacataatcacaaaccttaagcaatacaaatgtatggcaatttgacatcatgcatggatgataaccactcgcagatctaaatcaaaatcatcgcgcgattgaactagaacaattaatatcacactttcaaacataggaagatgaactgtagggcgtatatataattatatatagtaatgtcatatattcatgtatcaaaatataagcttgcacaataacttgacaccaattatatatggatcttaacaaaaaccatgttgcagctatgatcaagcagaacaaccaaactgatgataaataaatgaatagaagttacactactacgaacatagtttttgatggtgacaaaatctggttgtgcaggcggccgagccaccagcctctaacaaattaactaccagttccacaaccgtctatgaaaaatagattttcagaagcgagtactctaaggagaccgcttgtgaattgattttcaaatgcgatagtctaaagagatatgtccatgcaaatgtcttttggtgcaaaagaaaatggaaacttaaatctaatcatagcccgcagaatcccaaattcacaaattcgccaaatccatcacggtgcccctctgcatgcaatagcagctgcagccatgcgacgatgtcctcaccatagtcattgtcgctgtcgttgagtcaaatgcctcgtcgtggttgtcatcaccgagccaccatcgtcgccgagggggttgacgaagaagggtaaggaggcaaagcgagcagatttgccactcccaagaccatgggcgcgctcagtggtcgagtcgctaggagggagggagaggagcagtttggcggtggttgacagtggtggcgacatggatggaatagagcgaaggaggagagaattgggagagaggtaggagactgcgcgactcatggatgggccagcgcattttattaccgctcctcaatttgcataggccttctcgctaggaggctctcacctgtgaaaataaagatattttcaaaaaaataaagatattttcgggcggtcctcttaaatgctcaatagtaaaaatcatttttaaaggtgagtttagaccacaagaccttctcagtattattaccagcgtaattttaatggtagagataaaacccatttgtctgggaaaatcatctttcatattattaactattaaattttgacaagctataggtatatgtcactaaataaatgaaaatcatgttaggactctgtgctgaacacacaaactgataataaataaatagtactccattcgtttataaatttcatacataagtcattttgactttccccaaagtcaatttctttagctttgatcaagtttatagaaaaatatagtaacattttgaatataaaacaaaagaaattatcaaaatatattaaatgttagatttaataaaattaatttgatgctatatgcgttgctatattttttctataaaatttgtagattgatttaaaatagacagaacaatttataatatatatggaacagagggaatggaagtaacatggaggaggcgagatcgctgtgacggttcaaggtagcaattgggcatgtggttggagatggcccacaggcatatggcatggccaattttcacatacatatatatatatatatatatgcatccaaaattcccccatctaggccggtagctagagttgctaccaaccttcctctaggaaaaagtgaactttaaccccctcaactatggtccaaatatgattcatgccctctaaacgtgaaaccgggtatatcgactcctccaactatcaaaaccggtgcaaactatgtccctcggtggttttggctgacgtggaacctacatgacggtgttgatcgggttttcatcctatgttgcgttgacatcgcaaccacgagccctcttcacctcgcatggctcagcggggtggtgtggagctagctcgacggttcggagaagctcatggtggtcctcctgtgcacttcatctaggagacgggtagaggcggcggccagagaaaggtgaggagagagggttggcctagaggcaatgggcgggcgtcgtagagaggaggggcagagggagaggtggtgggggagaggagaacggctacctccatggctgagagctccgcctagccatccgaggcagtcgcggtggtggaagagagaggggagaggcggttccgccgagctcgtgggtgcgatggcgcgaggcaaagatagaaaggagggaggatgacatgtgggcccatatatatattttgtatgaatgactgttaacaacggaattttgcatcaaactcagagaggaaggaacaaaatcgaagcagatttggtgcaagatcgaattagatttagaatcggactacgcatcggctggtattgtatcggctggaaatagagtacagacttggcttagccgatatggcgaatgactgatacgatatgacttgggctcggttttggcctagtttggaataaccgccatcgccaattatagatagagctcaattaaggcaattgtatatattaattagggtatttatgtcagtttttgttagagatatggtaagagaccgtcatgcggtcttgtttgtattttatctttaggaaagtttgagtcatgtctataatggactaagcccttgtttagttcccaactttttcttcaaacttccaactttttcatcacatcaaaactttcctacacacataaacttccgacttttttcttcaaactttcaattttagtcaaactttcaatttgagagtggaactaaacacaccctaagcttgtattcggggtataaatatagaccccagatcattgtaatagaagacaacaaatccaatacaactttggtgcatcgccacccatttgttcttcttttcggcgacttctctcaacaagaggtaagtctcgatggcttgtgctatcggagctattatgtcgctttagatgttttatcatgacccatctgctatcatatgtcttagttaatctagtcttagtatctcgctttagccctatcagctagttctcactttagggttctcgccgatatcggctaaattgtcttactatattagattagctaaggcatccaccatcctgaaaagcgtttaattacttgattgtttagactt

SEQ ID NO: 52161 - DNA, 1348 bp, Oryza sativa
aagggtgagaaggaagttgagttgaagggctgataaggagaggagaaaaggaagatagttaaggatgcatgtatgactgttaggtccggaagtggtaggtagactggcagatgccagatagctgccctccttgctgcagtttaccaaatgcaaataccaatgactcggctcatctaacattactaggtaatgtaccaatttaatctgtggatcacaaaaacataagataagaccatgagctccaacactgattcaaccatatactcaagtaacttgcaagcataagcacagtagcattgttgcattaaccataaacagcagtaataaagagtatttgaactgatgaattctgcaaaatggattactacttacttacacaagacctagtatagtctacatgtccttgttgcaagctcaggggaaaacaatcaccgcaagcacagagacaattaagctctcaagagcagcacagaatgaatcaatagctaggactgttggttgctgttgttgttctatatggatcacagaacataaggctatgagctccaacactgattcaaccatttatactcaaataataggcacaatagcattgtttcattaaccataaccaacagtaaagagtatttggaccccaaaattctgcaaaaagattactacacaagacctgttctatttgtacatgttgttcttgctgtgctcacagaaaaccatatatataatatcagtaagaacacgaagactacaaataagttgtgaaagagcaacagctagctagcacgaatgttggttggtggtggtgttgttttggatgagggtatggatgagctgcagcagctgggtcctcatggccttgacgctgtcggcgttcacctccctcttcacggcctccaaccaatcggaatcggaattggaatggcgggcgcgggtgggccaccagttgcagatggccctggccaccgctagcacgaagacgccgcagtcgtagccgtttgtctgcctgggcgtggggccctcgatgagcgggatcgcggaggcggggagcagcgggcggagcacggcggcgaggcggcgcgcggagggcaggttggtgggtgggaggctgtcgtggtggacgaagcgggggccggagacggcgttggagttgtcgaggacgaggagggtccagtgggagccgccctcggcgtgggagacgtcggggttgtcgttgacggggaggaggacgaggcggcgggaggcgaggcggagggggtcggcgacggcggcgacggaggcggggtcggggaggttggagaggaggtaggggacggaggggggaagcaggagtaggtcgtcgtcgtggtggtcg

SEQ ID NO: 52162 - DNA, 930 bp, Oryza sativa
acggtactggccgtgcagcgcagggtgcatctgaaatcctgaacgaaactgccatcctagttactagtagatgctagtaaaacaattcgaaggaaaaaaggaacagagattttgtcatgaattgatattattaacaacagcacaccgaagtactcctcgaccttgtttttgattcaacaccaaacaacacccaattcagcataagctggctggcctggtaccatatagccatttacgtttggttcagcaaacccatcaacaaaataatctcatgtgcaccacaaaagctactagcaacgagtaacgtatcatgtacaaaatgacgcttttactatgccaaaaccaagaaaatatttccacatgacggcaaaaaaagaagaaagaagcaaatgctaaacggtttatatattctcgagtctgcttccaccacaagtatatataaacttgaaggacaacctcatggatgcatctttgatatatatatcctttcgcccaaaacagaacctgatgaccaaacgaggcaaatggtgagtaacttgccagcaaattccagaacaaacacagcaacaaattccagaataaaatggaagagaccaagcacaaacagtactaaccaatgcaataagaagataactcacaccacctatccaggacaaggggtagcaagccatgcatataatatagtaaaaaaagatgtgaatagaatggtgaaacacaaacctggtgcttgaaacgtctggttacacacccagtttcatgctggtccacttgaatccaatgcctttcaataaacactcatgcgccaatccacaagctcaacaatcaccaagttgagcctgtgcaaccaatcaatttcaagaactgagaaatgtgcaagttagctgggtgataggtcaagtcgcatctcccaaagatagggctgcaggaatt

SEQ ID NO: 52163 - DNA, 615 bp, Oryza sativa
attcctgcagcccgttgttggttacgactggcaaaggcaatcagtggaattatgttgtcattaacgataaatgcatgttttatcaggaaggaaaatctttattaagcactaattgggatatataataatgttatgaaatgtgttatataaagttgagttagatatttattaaaaagcttgtaatgttcggtgtatctaaagcttaatgtttgatttcaccgtgaagcgttttcaaactcctttgttttaggcaattttaaggtaatggaaatacacaagaatgccttttgactttgctttcaggaaattatataagccattagtttatatcttcatagatgctgtatcattgttaagctccatgcgattaattttatatgtagtgtccaatggtgatggtgtgatttgtacatatattcatttgaacaaaatgtttcacaacctgtaaaatatgccagcggctttgaagattacttttcttgacaaagagattcggtcaggtattgactagtcaatcataatcaaacttttggtttagtaatcttatcttaaccatatataaccatatttaacggtgaggaaatcatatttgtttgtattattatccgttaccat

SEQ ID NO: 52164 - DNA, 664 bp, Oryza sativa
aaaagcagtaaaaagaatagagattagaatcagaattccataatttcttggccatagattcgtctcccattacaaaaaacacacatacaaagcaatgaaatcacaaaatattatatcgaaccctcaagaagaaaagacgttttgttcgaatcaaaacattgtagaaagaagtcattaattccaaaactataggcgtaattcatcacaacgcctaaccacggagttcaccgcaggacaacccctaacacaactaatacatcatctttaccctatattctgatttgggggacacgtcaaaccaacccttagcagcatgctgaaggtttgataaatccattggtttgtcaaaagtcacaactaaacaatcagcaacaaattattgtcattatactcgacgattgctgggcaatcaccgggccaatagatgtccgggacaacacgtcggttggacggtcaacatcattagtcttttaaagagatgccttgcaaaaggtttaaacgaaacgttcagctttccaattctcgtcatacctctgtcgaagaatatgacacagaagcaatcacatctgaaaaaaaaggttcttgaaatgctccaatacaggcctatgatgagaaatgggttaaaatttgggatcaaattgagttgtcatatttatgtttgtgt

SEQ ID NO: 52165 - DNA, 664 bp, Oryza sativa
ttggtgattcgttggttgaacttgaacagcactagaaataagcatcaccacccttgcctggcataaacaccacatgattgaattaactagatataggcatacccatgcaatgaacatgcttcaataaactaaccaggggcaacatctggaggttttggtatatatatacgtggagattgttgagattgtctggcatcccaaatcctgcatgtcccatcatctgatgatatgcacaccaatattgtgtacataattgagagaaaaatagcaagcaaataacaaattgcaagatcaagggtacataagcaaacaagataaggctatatcacaagaatatatatggaataaacatattgtaataaatctgacatgcataagcattcttcatggtatgaaaatcgcacttatgagatctgcagcgttcaaaaagaaagttacatttacattaaagaaaaatcacatgatacaccatggggtgtaccatttcctttattaggaaatggcatactagtgtccactagaacagttacataattcacataggtattagtaactttagtgctatgtgcacaaataagtaggactgaacaaattaagttcactcacatactctggaatagataagtcttcatatatcgcctgtgatatactccctccgtttcag

SEQ ID NO: 52166 - DNA, 965 bp, Oryza sativa
agcacaattggagacatggagtcgtcattgtttcttgttatttcttcaactttaacctaccaaaatagtgtcaaagcttatcaaaattctagcacaagttatggtaggacattgagctaaaccagccctaaatattattgccacaatgtgtcatgcatgtacaaagttatttcatccgaaattacaatatctattatattattaaaggaatagaaaaaagagcctccacgttcgctctcaaggcctagaaattctcacattaatcggagaaaaagaaaaaacagagtccatatagaaatacaatttagaaatagctaaaattcggaattaaaaataaggaatattagaagaggagactagagtccatatagaaatacaattaggaaataactgaaattcagaattaaaaacaaggaatattagaagtagggtatagagtccatatagaaatacaattagaaaataatagaaatttagaattaaaaataaggaatattagaagtagagtatagagtccatatagaaatacaattaagaaaaaaaatagaaattcggaattaaaaataaggaatattagaagtagagtatagagtccatataggaatttaaaactaactaaaactatattattaaagaaatagaaaaaagagtctccatgttcgctctcaaggcctagaaattctcacattaatcgaagaaaaagaaaaagcagagtccatatagaaatacaatttagaaatagctgaaattcggaattaaaaataaggaatattataagaggagactagagtccatgtagaaatacaattaggaaataactgaaattcagaattaaaaataaggaatattagaagtagggtatagagtccatatataaatacaattaggaaataactgaaatttggaattaaaaataagaaatattagaagtagggtatagagtccatatagaaatagggtgcagg

SEQ ID NO: 52167 - DNA, 677 bp, Oryza sativa
caaatcattaagcaacatccgtaagagtggcaaatagttaaaagccccgtgccagaaaggggagacgcgattggaaacggtgggtctcgtcggttgatgcgatcatctcaggccgctcggttcggtatccacgcgtttgcgcgatcggaccgatgagcgcagcgcgtcagcggcgaggcgagcacgcattttgacattcatttcaactgctgatcacactgtcatgatctcgtggaaacctgtctcgagtgcgattagctatgctctcctgtgctgacactctactatgcatgacagagtaatagtaataacgagctgaaagagacgggtgcatgtgtggggaaaagttttcagctagtggatcgatggatcagctcgaaccctatccatccacatcgaggtcccggaggccggagggctgtgaatgttggcaagattaactttttgctagccactactccatccatatgggcctcgaatcatcgacctcgatcgatcgaccgatcgatcattcactagcaagacgccaagctctcctctcgtttctactgccccctctccttcactgcatcttatccgctacagcttcacttccatgctgccttaccagttagggcatgtttggtacagctccaacccctaaatataacttcaggagttaagtttggagtggagtt

SEQ ID NO: 52168 - DNA, 2022 bp, Oryza sativa
agcatttcggtcttcggttagttcggttcggtctcggtcatgaccgaactcaccagaaaaaataatcgcaaaaaaattttgaagtacaagatcgataaaaatgcaactccgatgaaagggctaaaatatgatgatgccaccaagtagcaagtagagcatgatatggaaaaaaaggcaaatcaagcaaataaaacttggatcccatcgatgtcaaccactccagatcccatccatctctccctcgtcgctattcccgcgggccgcatctcccaagtcccaacagcctcctaccgccatcgaagctctcaggtcgccgaggggaggacagggaggtgagcaggagagggaaggtgaagcggtccggttgggggcggacggcgcggccacggaggaagcgagagccgagaagagcggaagcggggagcgactcgtgcgccgtgggggcatggggagttgtgggcgaactgatttttctttttccgatactcgatcgtggggactgggactgggactgggaggatgaggtcatgactggtggctgtggtagccggatggatggggagttggtttttgctatacgtgatgaggaattgggcctagtgggctgagatgtcatgtgttattgggccactgataaatttcggttttttcggtcaattcagttaaccgagtcatgaaaccgaattgaccgaaataaattcggttagttggaagcacagaccgaatttttcggtctcggttatttcggttcggtctttttctgcccacccctagacacaaggtccctaacacaaatgtcttgcactagacaggatgcaggggaaaataatcaccataagtcattgatgattgtggaacaactgagcattgagttcaatcaattcactgatactaaaggatgaggcatcaatcgacctagttagactgttgagggccttactggcatgcacacatctcacatcttcattactacttaatagctagttagctactatgaggtttaggattgaaagcaacatttaaaaaaatgaggctgatttaatgctcaaatcaaaatggctctcccgattgaacctatttatttatcagttttcatttgatatggccatgatttaatattaactcatggcttgtttggacataataccttcctatataattaagtaactgcaattaatttggagatatgcaatgacttcctcaacactaatatgtcactttaacaactcaaatatcatggcatgcaaatatgtaagccaaaacaaaagaagcaaaatgtcatattggtatgattgcaatgaaaaagatataaaggaataaacaaaagatacccatgatagcagcaagcacaaagcggttatccaaactccaaacaatcatattaacaccacgaggagtaggctggtatctttgacgtggaccaccgcgaggtggttgaggagccattggaggtggaggaactttaagatggtaagctcgtgtccaacgtccaacctttccctggatcaacaccaataacatgtcatgaaaaaaaatatttttgaatggaagtatagagaaagagcactaaagatgtctgcatttccacagtacagattagcaaccaataaacgtgccttacccagtatgtgtggtacaatattacagttggttgctaaggcaggtagattgtacactggccaacccttactaaacaacctctaacactagcaattcatcatgtgaaacaatgaaaatacacggtgatcgcataagaaaacaaaatgggcaattattcagcaagcgtttcatataccgtagcaatggacagaacaggcagttatgcaaatcacaatataactgttaatctaaaaacactttttcaggagcgaaatcaagagatctagatcacacgagcttacatgtgatctccgagatcgtggaacccagataattgcactgccatcacgggagcaggtgacaatattatgtgtgaacctagcaaaagcagaaaatttcagctgaagtgaaaccgttgaaacc

SEQ ID NO: 52169 - DNA, 550 bp, Oryza sativa
attcctgcacccctgccaagctgccaccgacgccgggtttgttgtcgaccaccaccggctggccccacttcttgctgaggtcttcgccaatgatgcgagcgaccgtatcggtggaggtgccgggcggaaagcccaccaagatggtcacgggcttttgtggaaagcccgctgccagagcgcccgtgctggtggccacagccagcagcgcggcggcggtgcgttgtttcatggagtctccttgggtggtgatttatttttgattagattattgataatttatctgatggtcatcaggtctactacctatcgcgcacgctatccttgtgtgacgggggagatctcccgctttttttgaaccttgtccttggatgaactgcacgctgacctatgtctgatggcgttgataccccccgaacggcagcccagtgggtggcggcccagcttgaagaagacatcgtcttagggcgccttcacccgcgagagcggctggttgaggacgagttgatggcccgctttgacgccaagcggcatgtggtgcgcgaagcgctgg

SEQ ID NO: 52170 - DNA, 5422 bp, Oryza sativa
gtcctcctcatgccgccgtttacagcctcaagaagcgtgcactgaggagcatcctggtggaggtgtacgccgccgccgctggcggagctcggacagcccgcctcgctcgcttgctccgccgcccacttgcccgtccgctttccaggaagaagggagagagaggaggagagggaagaagagaggagcaaggatgaggaagaagagagaagggagagggaaggagtgaagctgacatgtggagcccacgtgggccctatcattttaaaattatttttttaactgatatgtgggcccacggttttattatttttccgatgtagaattgccatgtaagcgccacgtccatgccacgtgggacgaagacctagtcaagccagccacgtaagcgccacgtcagccaaaactgtcttccaaatctccgagggaccttgacagtttaaggaccggttgtatctggttttgaggtttaaggacgaaaatcggattcggtgtaaatttaagggacctcagatgaacttattccttatggcctctttaatgtacaaattctgggcctttgtgaaagcccatgtaaggatgttactttgtctcgaaaatttccaatgacatagcccaagcatgaaactggccggcctaaaccagcaaaagtgtttgtgaaatgttctctctcctcaggcccgtttggtagagctccaaactccaacttcagtgggagatagctcctataggagctgaggtgggtgtgaaagtgtttggctagacttgttagctccacaccaccacgtctcttgtagtcatttcgtcgaacacttggctggcgtcgccccgccgtcagctgcgcaccgccactactgacgcccgccaccggtcagcccgcgcgccgccgccgccatcagtcccccctgcgccgccaccacccagcctacgctgctgccgcatgccacctgtgtcgccgtcgatgccgtcagcccacgcgtcgtcacccaggcggcacgccgccgccagcccccacgccgccagttgccgcggatctcgccggaaatgatgcgaggatgggaggaggagaagtttaggggtagttcggcatttctatgtaaatacatcaaaaaattaaagggtagtgggttttttgggtggagtggagctgtggagcagtaaaaacccagctccacccccgcagtacaaatttgtgaagtagctctgctaactctgctccaaaaaatagagaatctgtaccgtttaacacagctccagctctagataagcagctggagctgtgccaaacgggaccttaatttaaccaaaaatataaaaataattctcagtgtcttttgccaaatgcctctccagtgttgcagacaactcctccctccgtcccaaaatataagaagttttaggattggacacggttattaagaaagaggtagaagtgagtggtggagaattgtaattggatgagtagtggaggtaggtggaaaaagtgaatggtggagggttgtgattggttggaaagagaatgttggtggagaatttgttatattttaggacaaatcctgagggctaaaagttgttatattttgggacgggtagagtattacccatccacaaggctacagatactagtctactaggtttttaccgttgccaccatttgctcaatatatacacccaagaaggaacacaccaatctaaaaatttcacaaactctagctacaaacttggccatggatcactcctcaccttgctttgaactcttcaaactctccacctcataaccaagaagacaaaaataagcagtactttcagcgaccaccatcacaatttcccaaccatttttctcattctcaatacatcccacacttccacaatatttcattccatatggtgtttcccaagcttcaacacacaaaattatcaaccttatggagctcttcatcatcctttcccatatgaagccaatataagccattctccaactggagcttttggagcaagtcaagctggttgatcgtactcacctgtaaaagctaggattttttgtttataccaaacgcaccaaaaaaatcatagagaaaatttggtcttaataatattatattatacatgcatggcccacttctttcgttatatgggtttgttcggcagccaggctgcactgcacgctgctaattttgtgagtgaactattattcgtgttggttctactgtagcaaacacgaataatacttattgtaggcatgctttcttaagcttccaaatgatgatttttaatataaatttatatttatattttttttgtagaaaagacaacttttcaactttgtagctcttaatcaattcattttgcactattaaatattatctattcatatattcagaagaatcaaactgaagcaactgttgcatatgtttctttcccctgctaatatgcatgtaatattgtgctactctctgtctcggtccattctaacatatagcaaaatctagcactagaatagacataacctattttttccgtcccaaaatataatggattttaaatggatatattcagatttgtagtagtagaaaatgttgcatccatcaaaaatccattatattttagaacggatggagtaatattaggaatttgaacatggcatgtctctagattcatgatattaggttgtatcattccagtattacttctaatttgcttattttgtgatggatgaagtatctcttatttcattgttcttcttgaaaagatgagtcttatgtatatataatcaaatctcaaaaccttaagtcattaacaaacgcaaaatgtcagtattctaaatatggaaatcattttagtagattttcatattttttccatgtagctatattttaaatatttttacaaatatataatttgatgaaaaatactaataaaacatgtgcgatggagcccgtcagacgtcgaaaagaatctttttatgaacggaggtaataccaagcaagccaacgtgtttagatcaaccatatccaccatcgagctagttaatttagtagtacaacattgggatcgagacgacaagtgatagatcggggcaggcagtaatcagaattagaataggcactgatcactgatcagaattagaatactgacaggctccccgaaaaaaatagtaccgcaggtaattccgaaaattcaagttccagatctcgatgcctaagaggcttttaattgcccatgtgcattttttactcaaaatttgtgttggatttggtccttcttaatcttcccagtctagacacactttgatcgatcggttatttcgggcccagatataggcctctttgcaataaagaaaatttcaaggatttaatttctgtgggagttgaactgaatcatgtgaaaatatggtactccctccgtttcaggttataagacgttttgactttgttcaaagacaaattattttaagtttgactaagtttataaataaatatagtaatatttataatgctaaatttgtgtcatcaaatcaataattgaatatattttcataataaatttgttttgggttaaaaatgttactagttttttctatataaacttgttcaaacttaaaatattttgactttaaccaaagtcaaaacgtcttgtaacctgaaacggaggtagtataatttatgtatataaactttaaaaggagtgtattatgtacgcatacttttgcttccctgccacatgccattaggccatactctcttcgtttcatatcataagtcattttgattctttttaagtcaaacgtcttaaaagtttaatcaattttatagaaaaagataacaacactaataacattgcattagttctattatgtctaacattgaactttttttatatattttttattaaaaatattacttatattatttctataagcttagtccacctaaaaagtttgatacctacaaataaaattcgaaatgacttatgatatttatgatatgaaacagaggtagtacgtacagtattacagcacactgaccataccagacaagtcagcgtgttagtctaaccaagcaagtcaatggtcgagctagctaattttatggcagacgacaagtcgggcacgtgcagtcttgccgacaaattcggattagctacagtattacgcagtcatgttgttttgtaatatatgccgtttcggaaacgagcaacgttgtttttaattatgtcagagagactagtattcagcatcctgaggtgtccttttcgttctaaatatctccttttaatgccaagaaagcttttagtattggttaaggagagtgctcagatccataaaatattgattttgtttagtactagtgcattatgctgattaattttgcgttaccataataatatgatttttttataataaaagttgtctaatagtagtataatgcatatcatctttatatgtatgttcgagttgtctttattcttaatgtttgatactatcacaagaaaaacataataccatacatagtggtgcttgtgatcagtaaccaagtgcctttatttttggatggcatgatatctatcagatgacatgctagaacctatgtgattttcaaaacgttatttcaattgaaccttttctaaagggagttcgggtttatcccattatagtatatatgtattttgggtatcaaaacttaatgattatgtttatgaatgatgccagagatgtaaattatttttattataaaaaaaggttagcagccatgctatgatcggcacatcaagacacatgcaatacaaaaaatataaatgcaacaaaaatagtagcagttctatgcttagtaattactcccttcatctccaaatatgaggattcaaatatctaaatcctcataaagaaaatatgaggattcaaatatctaaaatcctcataaatataaagtatccttatcccttctttctctaaccaccgcccccaccttttatatgggaactacagtatttttccattgtccttaatttctcaaaaacaacccacaatcctttgggacggttggggcgtaatatatagtcagattaatatagagtacatatttttttagataatggaagctttattgatctcagtcatctaaggataatcccggcctctgcaccacgacagtgcatacagccaacaaactccgacacactcaaaataagagaaaaaaaaacagcatacaagatcaaggccctacaatccgaagactaggtcgccacccggtataatcaaaatgtatcaaatgaaaaactttgtaaagataatggaaatgtactctgttaattaggagtacacaataatgatacgacagaggatatagattaatgtaccaatgaatgtttttaattttttaacctttttaatcttaaaaataaaccattctaaaacttattttcaaat

SEQ ID NO: 52171 - DNA, 1451 bp, Oryza sativa
tttcaaggattagagattctgtttggtgtcaacagctagcaacgccaaatatacataaacaaattaaatggccagattcctgtacctgcagaattagattttaacagcagctagtgtactttcttgctacgcagaacttgctatttatacgtacacgaatgatgcagctagtagccaattattagccgagatatcaatcgatacttctaatgctggttgttatgacaggatctaattggtccacgtagcgtcttgatttcaaagataaattcgagttatcagagaaaaaaaaaccgattttgcaataaatctgttgacaaatttcttcctcagaatttgtcgatttttgaaccgcttgatgaacctcgggattcgtgcttttgcgtcgacgctttgatttgtctctttcgacggccgctggctaccggcactggcgcggctcatgcacgcgtagatgtcagacggagggcagagataaagcggcagggcatagccgaacatgcatgcatgaatgatggcctccacacgcatcgaacaaacagacattgcgagttcgtaatccctctttcacgtgagcagtgccaaacataagttttataacggtacatctcacttacgtgcaagtatattatagttacagtgtaattacatataagtaacaatgtaattattatagttacagtgtaattacatgtaagttatagtataattattctatacttacagtgtaattacaatataattatattgtatttacatttgacaaatttttaagagaaaatttatcgacaaatgtataggtagtaaaaaaaatacaaaactgcatccggaagcatctggcgtgcgtgatcagcagcatggacagctgggtctgttctctgtatgggcctgggtggacttgcagtgctaaatgggacgattggcctagcagatagcacaaatggggaatgaagatagattaaatttcaggtttaggcatatactggaaaattaacatcagaaatatttttcatctaaattatcggttataactttagctagatattttagaaaacaaaaaaaatatttatggatttcataaaaaaatacatctttattcctcatatatgtcgcctcaattgtcaatttatcaaacacatgcaatattcactttgttataaattaaacctacatgtcaattatcagacgatactcccactaaatggttctttcaaatatataatgtttgcaaaaagtaaatgggaaattaataagttattataagaaaatatataaaattcagtgctctttatacgggctaaaaagacagcgcgccaacagccgcactaatttttctagttatatattatataagtggagagaattttgacggcgttataacgtagccagcctagtgctctcatcgcccgttctgctagttggcgaatcaattcgattgtgggggctgcagg

SEQ ID NO: 52172 - DNA, 860 bp, Oryza sativa
taaagattttttgagctgtggtttttgtatatatagctgggtagtatatacgatcaatcgttccatgtcacttttgtgataaaaatctggttgagtggtggaatctgatgtccctgatgctgtaaagcttataataacagtgattaataagcagtctgccttttgttgtccgacgaagtggaaaaggtgatcagtttacttacaaaaaggaaagaagaaaagaaaagctacaccaatagctctaagaagccgcagttcatgaacatgctgattagtctccttaataatcattttgtagaagtttactccggctagactgttatcctattgaggtgcgtggctttgatcagtccaaatcattgacacgtgccaggcagaaactttgcattattgcatatattgggcagtcaaggagagtaatatccctcccatatcttatagaaggcgctcgaaacaagtgctagtttaataactttgctcgccaaagaaaacacggaaccgtcactgtttctggtcaaataagataaggctatcactttcatctgttgccaataactctttataatacccgtatctgttgagaatatgaggcgaaaagtactagtagtagctattcctattgcacatttgtactgaaacattttaagataaaaattctccacatttaactgggtactctatttagctcatactgttagtttatttttatttatttattttgctctggcttgttaaggtcgctgtgattgctccaaatgtcccggcactgtatgaagctcatttcggcgtccccatgtctggagcggtggtgaactgcgtaaacatcaggttaaacgccgagacaattgccttcctccttg

SEQ ID NO: 52173 - DNA, 1425 bp, Oryza sativa
tttttttttaacaaccagcactagacggtgcgataattcatttaatagagaaagaaaaaattacaagtctagcacattcgaaggcagtagctagaaaagaaaaaaactaccaccacacatctatacagaactcaggagaaggctagtattggattggccgccactaggcttaacagaaaaaagttacaactgaaaccatcaaaaacaaaccctaacagtgaacaccgcacttaactctcgccacacccttgggattggaagggagagggtgagagagaaggatggaactattttccccaacaaggcccaccaacatggccaacttgcattggctagagcgcgccgcaagaaaacaaacatctagagaaagcacacacaagttgtcggagaatgattttggcaggaaggtctcctagacgacgtcttcaggaagaaaagcgataatgaacactggcgccgtcgtctatcgaggtcttgaggagtaccaagatagagttttcacccagcagccccacctgagggagaaggacagctcgacagcgccaagagggaaaacgacgcccgaaacaacgtcgctgctagcccggcaaggccaagctaggtattacacctattgcccgcaccattacaacccgcagttaacgctccaatgctccaccaccggccaacctctgtcggcacatggtcgccgctgtaccgacgcttcttgttagttagcctcaccggcctccttgccattgtccttaccaaccacccggtgccacccacgccggccagctgctaccgccggtgccacccacgccgacaacccgctaccatcggcaccacccatgccggccttccgctgccaccgacaccacttgtgttgcgctagcctccctttgccacctaccgcgcactgggccgccttccttaacctagcacctaccttgccaccataaaactttggcctcccatgccagggtggcccgcatcgatgcgccgaatctggctttagatctggcggtgtccaccgcaaatgcggcctccgtggcaccgccgcttgctgcccccttcttccctatctccacctccgcctagctctagatttggtggcgtctgtcacaaatccggtgatgcccaccacgtccgtggcctccccgctaccactgccacctttgctccccactgtttgttgtctcctccgtccccgcgcatgccgctgctatccacgtaccagatatggggttgtgtcgtctcctgcgccgcctccatctgcgcgccgtattgagtgtggccgtcgccgcgggccccgtcactaccgtcctagcaagccgttggctttgcctgccactcgctcaggcggtggctaggtagagggggaggggaagaagggtggcaacggttggtgtgtctttttttttcagagtatttttttttggatct

SEQ ID NO: 52174 - DNA, 2169 bp, Oryza sativa
tattagaagaagagcctagagtttatatagaaatacaatttacagaaaattaggaattaaaaaaattaaagatgagtctagagtccatataggaatatatataatttacaaataactaaaatatgatattaaaaataattaataactaacatgtatataaaatacaatatgaatattacacattagtagttttgtaaagttattgcaaaatttaaaattatgttatcattttaatatattttaataatataatgagaaaacatatatgttattatatgagagaaaatataatgatgctagccgcgcaatctgcgcgggccaccatactagttttttagtatatcatgttcaaagttacaatttaactatctatttaagaacgaaggaagtaatttaaagggtgaatagctaatttagtccctcaaatttcagcgaagactcaatttggtccttcacgtttcattttgtccacatagatccttcaaatatttgttttggcttgaaatcatcattgggtccacttaatatgccatatggctatttctagtcaatatttctattagaaaatgtcaattttgcccttaatttgtatacatctatatactagaaaagagaaagccaacatgaataaacaatattacagatctacttcccattatatcaacatatgcacatgaaacttaagcaattgctatcatatacacttgctagtacataatttttttttcgttttacataatatactatgtattatctataaaaaaatttaagcatgcaatttctctattatatatgtgaatgatgaggggtataagtgtcatttatgaaaagagttgttggttcaaggataagtttgaattaaaatgaaaacttgaaggactaatatggatagattgaaacatcaaggactaaactgagcctcagataaaacttggaggaccactttggctattcaccctaatttaaacccgattgtttgagtgtttcccttgtttgcataaaattaaaatctcccggccttacccaaacaagcagtaaggaggagacataattgttgcatgcatatgccacgtttatggagcatctgttcgaagtaaggtgcgctacgacagtacggtgtacaaacaactttatgccatgcattgcacatgtgtcagtttttcctttcaagggttggtataattaacaagccagttaagtgtccattagctgtaccttggtatcaattcatataattgcatcagatgatgcgccgtgcggctggtgaacggtgatcgatcccccagcatattaggaataggaataaaccatgctaatatactcatgcaggtgttggtcctgcaaatctttttgtacacactcgaaacgatcgtgtcggttctaatgtcggtttaacctaaagcatcgagtcatcagggccaaattaaggaccttgtgatctatataagcaacaacagctactactcctacttaataggccgccattattcgatcagctaattattattttgagctgttaagcacctagccttctactaatcaaggtcgttctttatatatgcatgcatgcgcgtaagcgatggatagatagtcagttgttgacacgtaccgtatgtttgacagcaagtgatccatcagtatcacctctagttgtcttcacgatcgagactctatacgcgtctgatctatggtccaatcaagtaagattcgatcatcatattggcaagcattgcatgatttgcttgcatcgaactttaaactctgaatatcatgtagggcaccttttatgtgtaacatctaattaactcgtttatgtaggcaaattgaaatcaccgtgaagatctttcacatgatgcattacattgaaggctctcatgctcgatcgacttatatccactagaatttgatccggcatcttctctatggcttgccaaatcatcgaactgcaattcaaaagatctgcacaatgcactgaagcatggtttatggtgtcgaactactcgtctaaggtcgtgtttagttccacagctaaatcttttttaaaggatacggacacacatttaaagtattaaatatagactaataacaaaacaaattacagattccgcctgtaaactgcgagatgaatttatcaagcctaattaattcggcattagcaaatatttactg

SEQ ID NO: 52175 - DNA, 2144 bp, Oryza sativa
tcctgcagcccttcgttctgaactattcgttcagcgagcaccatctttctgttcccccaggtctcggccgcatgtgccgcttcgtcttgttgctggaagtcacaattcgagcgtgccgtcggtcggctcgccgctgctggggcggcatgtgcgcgccgccaccaatgcttttcattcaacatgaagaaacaagcaggcattattcttatatcacgttgattaatttcaattacacatgaatgcaaattaaatttgatcgtattaactgcatgtcctaaacatatgacagaaccagcctttcacagagaagaaaaaaaaaacaatcattggatgcatcttcgacctctatttaggggtggacggaataaaaccaaaccaaaaaaccaaatcaaaaagatcgagaccgccgaattcggtaagtagtccggtctcaaccagtgaaagaccaaaatttattccgttaattcggtcagtggcctcggttaatcgaattgaccgatatgaccgagccgtgacccaatagacctagtacaccgaataaacccattaatttagcaaactaaaccctagagacagggtagagagttgcacctccgcctccatcattcctcggttcactccgcccccgcctccattattgtgctcgcgcatccatcctctgcgtgactgcatcaattgcacaccacattggtatgcaccgccttgtgcctccgcctccattgcacagctgtgcgctgcctccaaccagctccccttcacccggtgcctctagcctgcctccgcctttgtttctcaagtcccccacaatcgagttttggtggaaaagaaaaaaaggagcctgaagctccttaaggtgcggcgctgcaagcggcgacttgcaccacgctgagatggatgggatttgaagcttctcatggagtggtggagatcgacgacatccaagtcatggcaggattgatttgcttctttttcttcccctctgaatcgtgctctatttgttactggcatcatattgtagttcttcgtttgagttgcttcgatttttcgatcttatatggtgttcttatttttcttgtgagtaactttgtttgccattcaaaccactcttatgattagttcggtctatgaccgagaccaaactgaactaaacgaggaacgaagtgcgtggtcttgaattttcttgaagaccgatcgatcttgtgattctaaagactgaattttccaaaagaccaagaaacggaaccgaatttctcaattagaccgaatggccacctctacctgtattagagctggcacatctaaagaagtgaaaggaataacatttctcgcatagttaccaatgccacgtcatgtaataaatatggaccgtttgatttttagttcaaacgttgcaagccatcggatcccttgattggtgaaatccccttccggtccatctagagacttctttttgtaacgaggtactttcacatccctggtcttagtatttttcatttacgcccctacaaccctcctgtgctagtgagatgaggcacccagcgtccggcgacctcttccttggtcgctacgccacctccgcctttccctcccctcccgaaagatcgagacgtcgctcgatgtcttcccaatcccaaccgctgctgcatccccctcccccaacatccaacacctactggagcggcatcgtcgctcctcctcctcctccatatctccaccgcctctagtttacattgagaatattatgagatggttgttgctaaaattcaattggttaggatggtcaatgaagcttgcaaaaatatttaactgttaggcatcttctttcaaatatacacctataccattctactatccatagttccatactactacatggtgtagtataaatgaatacggtagaaaccagtatagtcatctttagagtttgagaaaattccctacatacctctgaaaagtttcgcaatctcttctatacccttgaattttgccttatcccctacatgcccttgagttatcattttgatctcctctatccctattccattagttgaccgtgagttgactgttaattttttctaaaatgaccctatcgcccatttcccatacttacaggtacatgctatctactctacttcataattcac

SEQ ID NO: 52176 - DNA, 1180 bp, Oryza sativa
aactgttttcgactggggcggacggaggacttgggtggtatccggaaaaggctagtaccgtccccggtcaattaaggaccgagccatgaagttaagcatgaaacgacccccgtacaaccgcacttctcatataggtatagacctagcggaatagatagctgagcggaggcagtatccatgcatagtggtttcttgatgtgtgaggcaggggctctacggtggggcagccattggtagaaccgcgaggcgggtgtctacagtggtgtcgccatcggtaggactgccatgagaaaaattaaacataattataacttaatgcatgtgtgagtctttccttcccgggtgcgccagaactcttctcactgctagaaaccgtgtacgcctagagtgcatgaggatgtaaagttcatggagcgggtactgccaatgcgaggttatcggaaagctttgccgtgacacgtctcatgtgttgagacgaggctcatgtgttgggcagtcgcggagtgcgggtaaagtatacatccactgcagagtgagtaaaccaaatctattcgaatagccgtgctcgcggttattgagcaccgggacatgtattacacttggctagactctaaattcttaacttgtgtgggatgggatattgcatgataatttctatactgatggagccacttcctgagaggcgggaatgtggacgtcctcagaaaaccatgacgactcaatggcaggaagctatccttaggatcacaatggatggtggacagaaccgtcattgtttaatatgaacactggtactaaaatttgatcagtctgtgctaggtcttagggttgtgaaaagaattataaaacttgctttgcgcaaaagaaccatagccatcctttaaatacccctgtcatgtgcattgttgctgtggtggcttgctgagtacggttggtactcacccttgcaaatataaacttaatcagaggccggagatgaaacttccgaggatccctatgcctattaccaggagggtgatgaagacgatggcgctcagtaggtcttagttacggtcgctgcctgtggcaatggcgtgccgctgccttaactccgctgccttacctacttctgtttttggaatgtattccggacagctcggtccgatgatttaagactatgcctgcgggcttatgatgtaat

SEQ ID NO: 52177 - DNA, 1932 bp, Oryza sativa
tgggttggtcatatacaggttgaaccattggcccactccacccaatttatttgcagtgacccattaagtaagttacccatctggtgtgctaattcttgctttaagctttgctcgatctagttttgatcagtttgaattgtaaatggacacccccttttaggagagacctagcggtgggagaagacaatagggctaccaccttaaaattgtttaaccaagttaggggacccataggagaaaagtgtacacataatcaagggttaatgatattaccaagacttggtatggttagccagctgtggtgaaggttgcagtagtacccgctagagacgaggaagagattgtaatagttgggacaagctcaaggttgtgatctagttgttgtagaggaggaataaggaaggcaccacgagacaaaaggagataatggtgacataggaaaaccagtagcgctgataaaattacgagaagggtgattacagtagattttgggggaaagaagaaattgtggttactttaaaaagggttttatgaatcttgatgcgatcctaatatatattcaaagtacatgttaagaaaggacttgagaagttgcacggcaaaatgtttaaacgatcaacttaaactgtttctacaatcaattaacagtagaggatttgaaattaccaccaaagttttacagtttggtgaagagagcttgggttctagttttctactactactagttcaattcggatcaaaagtccttcccgagttaaattgtttggcagggatggctggttggtcgttcttggtgaaaacgatcctcttctaaagaaaatgttggatacgatacttccgccaaattaaaagaaatgaacctgcttgttcttgggagtggtagaaacaaaccaatctccacgaccacgacatgaacggtaaatatttaagaagtgaaaacgatcctctcctaaagaaaacgttgtatacacgacttcttccgagaagaaacgaaaccgtgttcttggcagagggtggtagaaactaaccagcctccgtccgcgaccatgacaggaacggtaaaaactggacagacgacgtcacgagaaatgacggctcgccccggggctattggtgtcgtttcttctcgtagccaaattacccccgtacctgcttgcggcaacatattgctctctgtgatcactctcagtccctcgtcttcggaagagattctccggaaaatcactcgccgccacaccgatcgatctcacccctatttacgtgtctatctagctatggttgtgtacaccacgtcaacttcacttcctacatgcaaagatcaaaggcgctactagcctacaagaagcttattgaattggagacaactcttgattctctctgtgtatgaggagtacttaatctaaatgaatttggataaaagtagtttagattcgttgtattagtaaagatcacattcctttatagattgagtgttttttttttggacggaggaagtatcacgcattgcgtgcgtgcatagcttctgcatggaaatttggagaaaacagaggtggtggcacggacaaagcgcgcagacaaggatgaacacagtgtccctttcagctggcgagggaccggccgatcgatcaattggatatgcgctcagatatgttacggcttttgacacattcagctcatcttttcgtaatctcacttacatatgcatgctatctaatactagttggctggctccatctttatcctaaactgatgatacggtatataattcctgacatcatctgcttacctccaagaaaacaacgggggcacttggttattgcgtagatatatttctgttgcgtcccgtgtttgcaagcaaggttgcagctatccgtacaccagtacattgccacagcttgcgagaacgtacgtaagcatgcatataccctgcgg

SEQ ID NO: 52178 - DNA, 3995 bp, Oryza sativa
aaaatgtttgacactgttgactttttagcacacgtttgaccgttcgttttattaaaaaaatatatgaaatatataaaactatatgtgtacatgaaagtatatttaacaatgaatcatgatatgaaaagaataaataattaattaaattttttgaataagacgaatggtcaaacacgtactaaaaagttaacggtgtcaaacattttgaaacggaagaagtactagttttttccccttgatttggaaattaaaggtcagcgatcgcttgctacccagtacccacagtcgtctcctgttctaattgggcatgcggtttggttagcgtacgtgtgcgtgttcacagtggacctgaagagttctcatctccgtcgctcccattttcaacttcgccggagagcgacacactgtacgtgtcacggttactacttaatagcggacgatacatattttccatgataattaatctacgaggggcatgcatgggctaatacaatatggtgtgtggtacaggatcggttgcgtggtacagttatagatgcatcacatgaattaattcagctcgaataggggtatgtagccgcgtacctttgtacagacaaggcggttgctatgcgcatcggagtaaatacttactcccctccgtttcagccggtacgtactgtatttgtcattgactatcatgtgtgcacacattgactacagaagaccacaaaagttgatataaaatgactacatgaacctgccttcttaatatctttcaaaatgacacaccgaatagtaatactatagaactatttattttgttccaaaatatatgagattttagatggacgtgatatatcctagtaatcaatcttgacagagagtttatccgtattcattgtgctgggatgtatcatatccatccaaaatctcttatattctagacggaaggagtactaaaccattctacagtgttaaatcggcgcaagcatccagtcgctagctgagctaatgagcaccgaggggcgaaagagagagggagccagagctcgcacgggccagccccaaatccccaatagtatatctgggatctcactggcgatggatatactgctgcagctcgccgacccagaaattttcattatactgtagcacgaaatctccatttgccccatgcactcggtcgcctcagacccaccacatcccctttccctgtttccccgtcaaactaatgtccgcagtcactgctccgtgctcactcgcatgtgcccgtgtatgcacgcacgccaccacgctgcatggcggcaggcgcgcgggcacacagttgtaatgtgtggcacacctagccatggactactagaacacgcagcttgctgcatcgtcgacagtgagagagaggccatgggatgacgtcgacgtcggcacacacgctgttgcgatgtgcgagccggcatggcgcgcggcatccgcatgaagcctacttacgtaccgcatgtcgtgtctcccgctgcacaatctccgtggatatacgtggtggtgtgcgtgcgacgctggtgttgacgtacgatcgcgtgcactattgccccgggatcaggttgtgtagtgtagtgtacagggtgcgtgtgcgggactgatcgggacgaactattgttaaatatgtgatctgaattttaggcccacaatatatttagattagttatctaataggactctactttataggattagtttcctattaggacttctagttttctcctatatatatcccttgtaagctgcacgggagggtgcaacagcccaatgtatcccctgcgtttgtatccaattcgatcattgccggttggcgcctatagttttttcccacaaggattttccatgtaaaattcgtgtctccgttatgcatctattttcataacaggtggtatcagaactatgaaaatccgttccacaattcccccgttgtcgtgttcgtcatctatgttgagttcatcgtttcgcctgttcggcgatatcgatctaccccacggtgtcgtggtgactggtgagttttcgtccagttgaattgatctgttgctgagatcgatcttttctgctgccgcatagatctgttggctcatcaagtccgacgcggagtcggtgtttttgtgcgaggagaaaaaggcgatgcagcagccgtcgtccacgtctacgcagccgcacgcgtcgaggaagcagcagccggtgtcatcctcgagcacacacaggtggagaaaaatcagaagccaccgagagccactgcttctgttctgttcacgtgaattaattttcacgtacggttggaaatttgtgacacacggagtttaccaggaattcaagttctgtgcattgcttggttctgtcgaggtgaacccaaattcactttcaattgctacgttcacaagccagatttaccaggagtttagatacagagatcaaaatacttcattttatgcacctagagtgtttcgcgtttctgctagggtttcacaaattataccagcagattcagaattttattcccaaggcgagtttgaagtttaatctaccgctcctggattgagatgcaatattctcgttatggcaagtgaagatgcaagttggcgtagccatcgaggaggagaagcaagtattgctgtgcaccggagagaaaaaaaaaggcaacacattcaagtcgtcgagagggagccttgttcctgtctagatcacaaggtgatcaaattgtccggcgaattttgctaccattgtacccaatgtaccagaaggtttatcaggggatctaagtacttcgttttgagcacaacagtttcgcgtttctgctaggattccagaaattaatgccagcagattcaggattttattcccatggcgagtttgaagtttctgcatcagtttcgcgtctctgttgggttccacaatgtcataccagtagattcaggatttgacgcacattgattttatcatcatgaggttgtttagaggttgaagatttttatgctacaaggaaaattcgtctcaaggtggagattgttaaatatgtgatctgaattttaggcccacaatatatttggattagttatctaataggactttactttataggattagtttcctattaggactcctagttttctcctatatatatcccttgtaagccgcacggggagggtgcgacaacccaatgtatcccctgcgtttgtatccaattcctctatagtgatcattgccagtcggcgcctatggttttttcccgcaaggattttccacgtaaaattcgtgtctccgttgtgcatctattttcataacacgtgccgtcgtgccctaggcattcgcttggccaggctgccgcatcgtgctaggagcctcgccatatctatgtccttatgtatgccctactatagatggactaatatgttttatcatgatttttgagaaggcctgagcaactgcttacaactgaagggaacttaacattacgagaaacaacttattggtagctaacttttgagaatctgaaaatgtttggttttcaatttcgtagctatagtttattttctagattatataattatacatactattagaaactggttgagaatatgtattgattgtgaagatggatattataagagagcgtgcgactactataaattccttcaaatagggtctacataaactcaagagctagattcaatgatgatcagtttgccgagttgacgcttgcggtgtaatgagatattacgctagcatggcaaaacgaggaaagctttgttcgtccgatcttaactctcttcttctcctaagctatgagtttgttctcgtgggcattatcatttagagaaaatttcttatgtaacttatgtaacatcgaatttgagttttgccttatcccttatatactcttgagttttcaatttgattccctatgtatttatcccatatcttcattttccattttaaaaaaactttagttataaatgttcgagaaggaaaaaatt

SEQ ID NO: 52179 - DNA, 702 bp, Oryza sativa
aaagtttaggccctccttcccaacaccatcttaggatgagtgaagaggtagagacaaataatatattttattctctatggacagcccatatgtttatgggtagcttttgttatttctttgttatgaactagttccacaatattgttaggtggctgaaacaaatattgtattgcttatggaccacttttaaactatattgtagatgcccttattactatagtctatattattctcacattgttcaattataaactttattattaagcttgggtggaaaattacaagtaaatttctcgtcaaccgaaataaggtttaacagttttcctcgcaaccaaaaaactataattatttactatattattctcacattttccgaagattgaagaatttaactttcccttctgaggctgaccgatccatattttgaacatgctatttttgttgttgctattgagcaatatactacaggtgaccggcactgtgaacaagaaaaccatgttggttactgttctgcctcttggatactgcaaaatttactttgatcttccgttgccagtgtcatatgtacaagaactaaacctgcttgacatcaataggggaggacgtctttctgcactaaccaagtacatcaagaactgatgaagaacaggggtatagtactacagtatccgtaagtttctacatcatttttttctcatcaag

SEQ ID NO: 52180 - DNA, 1943 bp, Oryza sativa
aattctcaaggacggactccaaacaagttaattcttccggcacatgcatgcgtgttgttttaaaaaaaaaaaatagaacgcggcgatcaaacatgcatgtggcgccaccagactttctcctctgcgagaccagtcttaaaacatgttctgtttgaatcagcaaagcctcatgaaccaagatccaactgattactcaaagaaaccaagcagtttgcgtcactcaaaagaagagcatgcaagagcactcaccttctcagttcaaggacaaagccatgacctgcccccttgcttgctcgtcgttgccacaccgcgcgcgccgcagcgaaggccagcggctggcttctctcccggcaatcgcacgtacggttaattagctcgcaacgctcgctaacgagccatggcactctatattcttgtgtccatttggatggttggtacgaggagtagagagtgtgcaatctgggcggctgctgtctgttgctgttggtcgcctttacttctagcagcctagcctagccctgggcacagctgccattgatcgtcaacgctacagagcggaggtgcctttcgcgaggcgacgtggtggtcggctcggagtccgattgatcgaaatcgaagcagagaagtgaagagcgtgtactgtacggctgtgtttttccttttaaagttaaaagtttgggttgaaattggtacgatgtgactgaaaagttgtgtgtatgataaattgatgtgatagaaaaagttgaaagtttggatctaaacacagcctacgtagtacgtactccctccgtcctataaaaacacaacctagtactggatataacacatgctagtactactatacctctgtccaaattcattgttttagaatatgtcatattcaatactactctctccgtttcacaatgtaagtcattctaacattttttacattcatattgacatcaatataaatgtgggaaatgttagaaaatatatatctagattcattaatattaatatgaatatgaaaaatgttagaatgacttacattgtgaaacggaggaagtatatttgttttttttaactgatggaggactactctccgtaggtagcaagcaaaacggttgggctgttgctgccactgccaaccgggacagacaagtcccgcggccgcgaatgtggggggaggccgctgctgttgccgggggggcctcgcagctcgttcgccgcgcgcgatattctcacctccgtgcgccacgctcgatcgatcgatcgctttcgcgagatgctgatctgtcgacttgcgcgctggtacgtacgtgccggtagggagtacgtggggcacgaatgctgcggcctatctgctgaatcgtaattgccgttttgaagtcttggataggaaccaggaaaggaacgcgcctaagctacgtgagtgttgggtagtacgtagagagaggatggaggatggggatggatgtgcccccgcagctaagaaccttcccccattgtcttgcgataaatttccgtaaattaataaattttcgttatgccacaagatttgcatcaaaatgccattgtttttctatctctcaatacatcgtgtaggcccaagtcgatccttaattagggaatgctgcaatagtcaaacacttgtccaacaccgttaatcattggaccagattacgtacactcgtgggtgcattttctttccctacttgtatccactggcgagtggtgtgattgctctagatatggtgaactatcgatgagtttgagagtggttcactgtgcccttcatctgacatctgcgcttttacgcttttctgtataaaaatccacatttatttctacgatcttacggagtaccgaaaagaattacaaaaaatctcttctgagtaagtctcttggatgtctctctcaaacagacctggtttagttcctaaattttttttcccaaaaaa

SEQ ID NO: 52181 - DNA, 5286 bp, Oryza sativa
agggacggcgctggccaaaggagttgctgccgggggatgcaacggcgaccaccacaacgtcgccgtcctcgcctttcaacccgaccgccgcgctgccggggagcggctcctggtgttctttgcggcgtccaggtcgcgcacccgcttcttttgctgcagcctccctttgccgcccagcgcagctccagcgctcgccacctgccgccggcagaagggggagaatggatgagaaagggagagaaagagagagaaaagggagagaagaagggatttatgtggagaatagaaatggaatccatggcggcggctccggcttgctcccacccgccgccatccatggcgaccgccggtgccggaaaggagaatagaaaggggaagaagaagggggagagagagagaaggaagggaggaggaagaaggaaggtcagagggaggactgacatgtgggccccacatgtcagtaggcccacatttctttatgtgtgaatgactaatgggtcccacgcacatttttttatttctaatgccacctaagtgccacgtcaacgccacgtggaaagaagaccgagtcaatactgctacgtaggcgccacatcagcgaaaccgccctccaaaaccgcccagggagtcaaattgcatcggttttacgagtttgggggttaagatattcggttttgtggtttagggttacgaattagatttcgatcacttttgagggtcatgaagtgaacttattccctgagctaatgacagaagggatgggcctcttgagttatgtatgaagaggcatcatctcaggcattggtatcaatgcactgcatcaactttccttctctttttcagaatccgagggagcgatgcctatccagattttgtttggatgggaaataggaggctatccagatttgtaatattagaatatgtttgtttcaaccaaaataagggagtactaagtacatggacatcatactacttctttgttcatcctcaaataaaatgttgctacctagtatctgattggagtacttcctagtacaaagaatctgaacagggagtatctaatcaagtactaggtatagtaacattttaggacagatgaagcaaatgatgagcagcagtgcaggtgatgaagtggtcaagagactatccttctcattgcactagatgtcgtagcatgccacgcctctcataccgctacggaacatgacgatggggggcatcgccgcgcaactagaacactctgggactctgagtaaacatatttaagtataaataacaggacctcacgaggaagaaaaatacatcatataaaggtagatactatatagaaaatatgtatcagattaaatagtatgtgcatataacaaacaaaatatttgtcccgttaaatggtgcactcttgtgaggaaaaaagatacatcatatcaaatgctacatccatatcaggaacataatatctatcatattaaatggtgcaaccttatatagaggaagatatgtctatcagttaaagctaaaaactttattttatcaatattgtagtatgcccccaatttgcaatataagttgtaaaagtttgaaatacctagaacatgttcacaaaacacgacaattattttggagcatttaatgttcacatggtatatctatcaatgatatttcgcagaagaaatgtttaaggttaatggatagattcctcctatccccttacattttactttctctttggaactctatccaagagcactgaagctccaaagagcgtagccacaaagagagataggagtcgtctatctgttacccttaaacatttcttttgagaaatatcattgagagatatatagtgtaaacataaaggcttcaaaatagctgttgtgttgtttgaacacgtacgagtattccaaacatttacagcttatgttgccaactagtgggatactacaatgctaacaaaatgaacttctaaaagctttaattgatgtacatatctttccctgtacaaggttgtgtcatttaatatgttagatattttgttccttgcatagacatagcatttaatatgtacatctttttttcttccttataaaggtggaccaattaatgtgacagatattttgtttctataccttttaatatgatacatattttcttccttatatggacgggcctatatgaaatacattttagaatgaaagagtagtaattatcccatcaatcaactctcatttaaatttcttcatatctcataccccagtcatccttgaaccttatccacctctcatttaatgttgtgtgccaaagtgttttgttttttcccttattctctataattattttataaatgattattgtagtcggagggggtatattctaggataaaatttgaactctaaaaaagagatattccctctgtcccagaatatgaggattatatttttaacctaagttaaactattttaagtttgactaagttttaaactacacccgtctcaaaatataacagaattttcccatataattacatgagccaaatcacttattctttgaaatgggtatagcacagaagaatattaacatctaccacacaatctaccacataaaaacagtaaattataatgatatattttataatgggtctaatgatgctcatttgatattgtaaatattattttgttttcataaacttagttaaacatagtttgacttacaacaaacataaggtcctttgagacagagggagtatatgatatagtagtaccgaatgtaagagcatctccacgagtcccctaaacatattctgtaaatttaaattttgggaattaagttaaaacacatgtctccaacaaatacccaaaagagctcccaaattttaaacacctctaataccggcgccatcctgagctagatatggggcacctcatagaactcccaatccccggccacaatcacgccaattttttgccgctggcatcattttttggcaatcgtgcgcgatcaacctcgcaatgatgtacaggagaaatataatcggccaaaaatagttgaggagggcccactagcgatgagataatatatttcaatgttttgaaacctaagcactgactctgttggagaagtgggtgattttcttcttgcatatttttgagatgaccataatccaagattatcgggagtacaattttaagccattggcctaatctatacacacttatcacagttaacaagtataatccaaaattagcaggagtttaattttgagactggtatgcctcttattatggtttaccatattgctcatctaaatgtttttatcatactgtttttgagattaaaaactagtatttatcggtttgtcgaaaaccgagcaaaaacctgtgaaaaccaacaatttatatacaggaaccagcttaaacaaccccgtttcgggaagcctagtatgcaaacgtttgcggacaccgggatcacacgaacgcgttgacttcccattttccgacttcatgttctatggggtcgttttatttttagcgcaaacgagatgaaggcctttccgcccctagttttagctatttgtgtcccaactttccccacataaaatttcccgtcaaaactttacctacataacccttccttgtataaactttctatcgagaaactttcattgtataaactacttcccgaaaatattacccatataaacttttttcccaaaaacttgcccgtataaactttcgcccaaaaactttccacatataaactttctccacataaactatttccatataattttcatatagaaacttttatagagaggagattacaaataaatgaaaaaattatttcaaaatcatatgaaattttaatcaaatctcaaaaagtatatactcaaattcaaagaccttgaaatgaatctttcaataaaataacttctcaaaaccctgaacttaaccatggcatggagctcaccggggtgcagtggattttttgctggagagaaacagatttcgtgcacacaacaccttgccagagggaggaaaaagcacgtcgtcgttgacaaccacagctgcgacagggccacctcgcccttcgcttcatctgtgatgacgacctcatcactgtgcgctccgtccatctcgccaaggtgagaagagaggggaggggggaacagggctcttaccgaagaggtgaggaggaatagggagtatgcacacaacttgatttgtcgcgatagtggtggaggaagtgtgagaggaactcaagcagggaggaaaaaattatgtgatagaacagatctacttcctccgtccttaaaaagagtcgattcctagatccccaatgcaaattttgtataaacgtgaaaagacaaaagtgccctcattaactatatccatttatcaactatgccgtttctatgcacatgtatgtaagagacatcttatgcataataaacaacgccaaaaaaatttaaaaaaattcacttgctggaagaaaagaaaacatctacgatctctccaatctgaggggaaaaatgctcttaattccccctgtaagaactactactgcaaacaacggcaaaaaccaagaataaagaaaaaagaaagacaaaaaagaatagagaaaaaaatacaatggtatttgcctttaccactgtaggcttgtgcatcgagagtcaggattagatcccctgtaaatgaaaagcatacaaaacgcaagagaagagagatggggcggagataagatttgtggtgttaaagcgtgaatgatagggagagaggccagagtcattgaatgcttctattttttaagcattctaagtcggttttttataggacaaactctccctcgtacattcgtggtgaacgttcccccacccccacacaccccccgttttcacaaaccgatgcctaacatgcttgcgtgcaaacatcgatagtgcgaagtttttgaatttgaaatgaagagctggaattcatgagcagaagtatcaagatttcgctgtacgaaaatataaatgcagagacgctcagggggtgctaaacaacaaaaactgaacgaatgcacgcatccccacgctgggctcactcttcccctgtttccgtgccaaagatgagcatccgaagcaaaagagcgtagcgcaagaggaaaggagtagacaaaaaccgacaagcttcacgtttcggattaatggcaccgaggcattttcccagcacccaggcgttcgactgacgccgacggggccaacggcatttacgcctagcaacaagcacacacagtgcttgggggtgcagg

SEQ ID NO: 52182 - DNA, 3508 bp, Oryza sativa
tttagctgggaggtgctgtcttgtaatacaagtttagatttgttactatgggctggtttggttttgggtctaaattggccttaccaatttttatcaatgtcaaattttgtcaacttttggcatggctaattttggcaaaggtaaaattgtgtttggattgaaaccaaaatagcctaaattaactgttgaaatggcctattttcttaggcatgccaaaatttggctccaaaccaaatagacaataaacactattgaaattgacaaatattggtaaggccaatttaggcctcaaaccaagccagctctatattaggagagattatattagaagaggtcgcatacccatctagattgaggtcgtgtttagttcaccctcaactaccccaaactttcaactttacatcacatccaaaactttcttacacacataaactttcaacttttttttttccaaacgttcaactttccccaaactttcaacttttttcaggaactaaacaaagcctgagtaattttgggatggagggagtatgtctgaaaataactttattcttattttcctttttaccactggtttgtatttttctattactttagtgctctttaccaatcccttgcctcttacctattcaccattaatcctatcattttattaatatatgcttgcttcgttcataaagaactaagtataatatgtgacgcatcctattaattaagaaagggagactaccttatcgaggacggtattgtttctcggagtaaaagaaagctagtctcggggaaggtatggttgcttggagtaaaagaaatatagtagcaaaggatagttggttttgtgcgaagaaatagtgttttctattttcaagtgagagaaggactaccttaccttggatatgttaggatttctcttagggtgtgtttagttcacgttaaaattagaaatttaattgaaattggaacgatgtgacggaaaagttggaagtttatgtgtgtacgaaagttttcatgtaatagaaaagttggaagtttgaagaaaaaattgggaactaaaccaggcctgagtaaaaaaaaaaaagcacggtgctacgaggagtggccttgtttagttcccaaaaactttttcccaaaaatatcacatcgaatatttggacacatgcatagagtattaaatatagataaaatgaaaaactgattgtatagtttatatggaaatcgcgagacgaatcttttgaacctaattagtccatgattagccacaagtgctacggtaacccacatgtgctaatgatggattaattaggcttaataaattcgtctcgcagtttctagacgagttatgaaattagttttttcattcgtgtccggaaaccctttccgatatccggtcaaacgttcgatgtgacactcaaaaattttcttttcgcgaactaaacaaggccttagagtcacacccaaaatcgaaatgaagctattttgggatagagggagtaaataaactccatagatgttgcctcttatttcggggtattttggtttagggtagtgctaaaacttttggtagttttccggacgtgtttatagagaatgagcgtgtgcttataaaggtgagtgagagcatgtgtgtgtatgactatttgtacttatactatgttttgaaaagaaaaacagtggtgttaaatcttaaataagtttttgcattatcaatatttttggtatggtggagtagctttactcgaattgattgacaacttttgatatcatgcttgtttactttattgccaacaaagtaaaactgatcatttgtgagtaagacgtaagccaaagattggtaatgctattgttaaggacgtatctacaacgagaccgttctctatatagtcataaccaactaactcaatctcatatctaattgctactagtatactcaaaagtgcatgtatttttttttcttatgaaattttctcttagattagtcatccgatttacgatccaattacaccattatgttcataacaattaaatctttataacaagatctcacatgactatatttttatgaaaaaatacaaattacttttataatatatgtaaattacttttagattacattaaattacttcttagtcataaaagtaatttacctatatatagaagtaacttaaaaaaagtaaagtaacttgttacgacattaaaagaaatatatacattcataatgttattcataatattgtgagttgtttgttttacaatcatttttagtcagtgacgtaatttgtgccggttaaatttaatttctatatagactcatgtttttacctccataacggatttaattttgatgtcgtgataaagttactttctttctgttttaagttacttttataatttatgtaaattacttttagactttactaaatttactataatatgtctaagtagtaatttaatgaaatccaaaagtaatttagatatattataaaagtaatttataatttttcatcaaaatataatcatgtgagatcttgttataaagatttaattattacgaacacaatcacgtaatcggatcatagatcggataagttatttaagagaaaatttaatttgaagtataagtggttcctatttgcttgaaacataggggataaactactctctctctctctagcgtagtagagtgcgtcacatgctttccgatttggtctgttctggccttcttggcaatatcggcatgtggaacagatcagacgactacaccagcgtgtgggatcggacggtcctagatgcgtcgcgtgataagaccagatcgagaggcctctcgacttagattttatgtattgttaagttccgacaaggttaaaaaagtaaattaaaggtggtgttgagtcttatatcttattaaattttggtgtagtttcgagagtaaaaagggtatggaattaccaaattttgattgaggttataacgttgcaatagtaaaatctcttgggtgtgttctcaacttcttctctctcgttttcacacatagcttcctaaactgctaaatgacgtgttttatttaaaaaaatatattaattcatttttatatacaagagagaagttcgtaactttgtatcccgaacacaattagacaatggagcgaacaagcacatcaatccaaaatgtagaccattctattaatgctattatattttaggaatgttggattcaaaccaaatagccttcaccgttgacccagtcgggaacccaatagcacacaaccaccatcaacgtatatacggtatattcgacccgtcatcatgataaaagagatcattagtctggcatttacgtaagtattttttattagaggaagtaacatacattggtggagaaaccatctttggtcggtcaaccaaaattcataatagtcccggttccactaaaaactgaaactaaagatgatctttagtcccggttccactaaaaaccgggactaaagatcgtatgttgtcaggggctgtcaggc

SEQ ID NO: 52183 - DNA, 1816 bp, Oryza sativa
gataaacatcaacagcgatcgatgcgtgtgcggtgtgatggtgcgtacggccaacatcagtcgacagctgattggggggaggagaagatctcgggagcgattctgggagcacacatcctctgacgagcctatcgcagcctgtcaggttagtactaccaaaacaaaaaaaaagtctctcgagtttatctgaacccaatccagctctctgcgtgtgtgttaccaggtcaatcaggagatgagatgctacacgaccaagcacaccctagctaggctcatcactgtcacctgacctcactcactggactgagtctgaaactacgtggcctttacgccaggagggattgattgattaatcacccgggacacacacaccatctcccctgatcgattcggctaaactccagagctttggacagtgcaaagagagatcccagaaaaaagcgctcgccgcggccgccgtcaactgctaataataacaagggctctctcgcgctcggtgccgaatggtgtcactcgcatgcatgcccccgtcgccctctcgctttctcgagatcttgttatctagctcgatgagtacgtgcattatctcctcttcctcctccccctctcgccgcaagggacccgcccccggctactaccaccgccctgttgagtttgctaaaagaaaatttttagatatcacatcggatatttgaccggatgtcggaagaggttttcagacacagataaaaaactaatttcataactcgtctgaaaaccgcgagacgaatcttctgagcctaattaaaccatcattagcacatatggattactgtataggctaattatggattaattaggctaataaaattcgtttctcgatttccatgtaaattgtacaattattttttttatctatatttaatgctacatacatgtgtcaaagattcgacgtgatgtttttttaaaaaaaattaggaaccctacaactactactaccagcgaacgtatcgatcgatcgcactgagaaaacgctaggatcacacggcgtcccggccgttttttttttctctcttttctctcgcgcggggcggtgcttttcgagggctaagtcgctgttagtcaaatgctgccatgccatgccaactgccaaagccacttgaggccgaagagagcgaccagtccacccccgggctgtgtgtttgcagggagatatctcttgtagtagtgcagccaatcatgctggctaactttgacggatatgggtgcagcgtgggggcgagaggcagtcttaccggccggcacggtaagtgcgagggagtcgttaatgggacggtcgtcgatcgatcgatcgtcgtcgccgtcagtggcaatgggctttggaccattctagggagaattttagagcgttgttacgagggtagctataggatggtggaactaaacctttcgagcttttggatcataatatagttttagtgctagacgcgacttaagctagcttgagtcactgtagtactgtactgtatatgctaatggctatgtttgggaagcttctatcaacagcaaccttttgtagaatctccgactctcctaaacaaaggcgagtctagcatggaggtaatggagtctcgagtctctactactagcgtgaagaccataaaagctctgtaacaccctgaaaatttgaccaataaaaacaaaactctaaaaatatgggccttcgaaaaattttaaattaattgcatcatgccgatcttaatcgcctattttatttggatttgatttcaaagttcattaatcgtgagtaaagaatagttaattaggaataaaacct

SEQ ID NO: 52184 - DNA, 756 bp, Oryza sativa
tccctcccccccttctccacacgccgccgttgtcgtgccgccgcgccgtgccgcgacttgcgccgccgccgctgacggtgagccgccgcctttccaccccccccccctgcgtccaccaccgtcgccgccgagagggcaaaaagccgagagagagggagggagaacgaagctgggagggagagagagagaaaagaagagaggaagagagaaaggagccgggagagagaaaagagaaaagaagaaagaaagaaaaaggagagaaaggaagaaaagaaaaaaaaagaaaagaaaagaagagagaaaagaaaagaaaagaagatatatataaaaaaatataagattagggagaggttaaggaggtttagaaaatttaaaataattagaatttaattatagattaattatagtcgtagaattgtaaaatttaatataaattatagattattcttggtaatttctataagaaatcaattcgcggtagtaatttagatgtaattaataactaaacaattagatgaattcttatagattattatagattatttttgggtaatctctataagtaatcgattcacggtagaaattcggatttaattactagggattttagacgtatattatatttaatcgtttagtcatagactaaattaaatcgtacaatattataagataattttaggattttgtccgatatttagcccgcgatggaaatttctaacctattaaatggatgtaatactcgggctaattaaatta

SEQ ID NO: 52185 - DNA, 667 bp, Oryza sativa
ttggtgcttcctatatacttctagctagcagctgcaccaatacacacatgcatatcttagctgccaaggactagcaagcattggcgtgcgtaggacccaaagttagatgcaggcggagtttattgactactataccagttggaagttgattgagatttggtaaacagcattaggaccaactagaattaacctctccacttttaactcgacatcttcagaagcatggcgattgaagcaagaaaccaaagatgggagggaggtgggggcaaagagagagagagagagagagagagagagagagagagagagagagaaaagaagaagaaaatgtcctctagaatattgcttgagaccgaaagattcaaaagggagagctggctagaaagaatcaaatgctgccatctttgttcccaaggtgcttgtcacttgacatgcaccgttgcatctaccttccttgcaaacaacccctccccccatgtcaattttcgcaccccggatttaattcctcagccttttaaaaaaatttccatccatcgatctgcacgtgatggcgattgattctgcacactatagcagcaagtttacctgtagatgtgtaaagccatctggagaaggatgcataaactaatcatcaacggcgacaaaagtatacaattcgctggtggca

SEQ ID NO: 52186 - DNA, 715 bp, Oryza sativa
cgatcgtgttcacatgttgatctagtaccggcgttcatgatctttcagcaaaagcgatcgaatacgatggatgttacagttcacgaccgtggtggtcgcgtcaaatgtgacaacgaactctcctcccgtcttgacatttgaagcttggaccagggcctacctgtcactcgccggcaatgtacattgggggcgagccctgttgctatccgtctctccatatgcttggaacccgtgggtttgcaagcaactagctagagagcaagtttactagtatagccaactattaattttaaataatctatagttaattaaatagacaattcacacaatagttatatataaacatatactacactattaatacatggtcccacctatcatatatacactatgtcttaagtccgtgctgtaactggttataaatctgtatcctactgccctcttctctcttctcttttatctcatcgatatatgtttatagctgatttatagtctgctattgtacccctcctagtactaatataaaacacatatgtagaatacctagtaatattatattccctctatttcatattataataactgctttaacctttttaagccaacgttcttaaaggttgaataattttaatagaaaaatatagtaatacttgtagcaccaaattattacatttaacattgaacatattttgatattttttgggctgcaggaatt

SEQ ID NO: 52187 - DNA, 836 bp, Oryza sativa
aggacctgctcgccgtcgcacgcgtgccgccggccgtcgaccaggtgaagtgccacccggtgtgcaagcagaccaagctccgcaagttctgcacctccaaaggaatccacctctcagtatgttgctcagcactgcaaactaccgctccctttattctcagatactccctccgggattttggttgaataggatatcctatatacgtgtattatcaaacaaaaatctcttatattttgcgatggaggaagtaattaacattggcattatttaagcataaactttgaacctttttttacagaaagttttataaacatatgaaaatacactatattattgaagtatataagttataaatataaccatacaatttcatcacaatataatcatttgaaagcaatatgtggtcaatgtgagataacctcagtttactgtgtcagttattcatgaatgagtacatttataggggagtggattctaattcctcgatgggatgtcccctcgtatatttttttttcaaattcgatacaaatagtcgtaaaaaatatgaaaaaaaataactatgttgagtattgtgatatctatctgtcaaaaaaaattaaattcgacttacacatcgagaaataaaaaagacaaattcagatgtgaacagtacactactattcatatgctgaatttatctttttatatctcgatgtgagtttggacctaagattttatggagttgtatagataggagtacatccattttttaataaaatgacacagttaacttttttataagcatttgatcatttgtcttattcgaatttttaatgcgaatataaaaaataagtcat

SEQ ID NO: 52188 - DNA, 1520 bp, Oryza sativa
gggggggttgtggtgggccaggagagtgacgtgtcggagtggcaccgcgtggggaccaccggggagtcgttgggagggtgggacccacgaagacgtggctggctgtgacagtagcacccgccaattttttaagtgtgggcatgttcggattaggacggtgatttggcttaaagaaatgttggacttgtatggttttgtaccctactaataagttgttagtgtcaaactctagtcaagttttggcgctactaatattttgataggtggaattgtaaatgtgtgtctttgaatttatgctaattgagagataaattttaaattatggtaaaaaatattctagtattatgccaaattaagtataagtattaccaaacatttgtcttcaaaccaaatcatcacatttactatttatactaaaaaaattggtatgataacactttggtatcaaaccaaaacgccccgttaagtatcagtgtatcacagtggctgcagctcacgtaaggggaaaaaaaagtataatcgctgatttaactctatgcctcttgactctcggtctctcgggtataagctacggagtacgagaggagctgatcctgctattacgagtcgctaaagtagcactgttgttacgagtacgtaataaatgtcgtattaggtatgcgaattttagtccgaaatgcacataaatgtactgttgaaatgctaccctagcacgaaccatgttgaatgcattgctgaagcgtttcgaaatgagcattttaaatgcgggaaaattttcgattctaaaatgttacggtacggtgtggagtaagagcaggtacaatagcatactataaactaactataaacatatattgagcagataaaaaaggaaagagaaaagcagcaggctacagatttgtaactagctgcagcacagacttcaatacacaacgtgtatatgacagatgagactaggtattagtagtgttatatgtttatagctaactattatatgaattggctattaaattaactatagataatttgaagctactattttttttgaacagtcagggcgttgccgatgttttatataaaaaaagaagtgttccattttaagaagagaatgggaccaaaccatacaatgcacaattaattaggaaaactgggcaaaaaccatggctatcgagacattccaccagctaaactaagctaccaaagaaacgagagcaggacaaccaggctcaacactcaacaaaaaaagttcacatgaacatgcaacaagctgaaaagaaaacaagtttcccaaacattggcaaatacgcaacgttatcgtcatcatatcaaaacttgggcgactccgacttcgtcaagaacactagggtcaggacagcaacctagcccatgccaaagcacaaatcaactaggctcatgtcatcgttgccacacgtcgagccccaccgacgtcgcagctccaacttcgcgaccaccagtctcgttaaagcaaggcctggccaaatcgacaaaccttgtagcct

SEQ ID NO: 52189 - DNA, 657 bp, Oryza sativa
ctgctataaatgcggttaggtaagcccgctgtgctcacctaacccacacacgtggcgccaaaaccacagggggtcggggcgccccagccctcggggccgaaacgggagcggcccgacccctcggggagacagagggaggggtggccacgtcaccctcgggcccgacccccccccccaagggggtcaggccacgtgggtgaccgcggctacccaagcctctagttacgatacccccggccccatgtcaccgacagtagcccccggcgttatgccagggcgatcgcccccctcgagggaagcgctcgggcgtgacgccactccttaggcccggtgacaggtggggccggtccctacaggcgggcagaaacccagcggtcgcaaatcgcgcgcatcggcaagggaaaaccgaccgacaataatgagcggcctctttaagaccgctacattactcgagcagcgcgcgaatcgggacgagccggttcgtttcgcctggagacatgatgatggcgcatttcacggttggcgggcgtagttaatgcgcgcacgatctgccccatctcaaccgccatggccgcacatctgccgcatgcgccgcaaacaggcgagtggggttagtggaggcgtgggcgcgagaaacgagggggcgaggtagtgggc

SEQ ID NO: 52190 - DNA, 631 bp, Oryza sativa
cgccgtgtagggcgggcggccctggctgttgtagctgatgtagttccagtacaggcggccgagttcatggtccgggtccacccgcagcaggtcgctcaggtccgcgtacacgcgcgcgtacaggcgctggcgcttggacgtggtgtgctcttccaccaggaagccccagttgtcgcggacttggttgaagcggtcggccacgtgctccttcagcgcgtcggcacgcggcttgaacaccagccggacctgcgcaccgtcgagggcatcggcatcgaagcctggtgcggccgaggcgatgctcagccacaggctgtccggggtgaggatgcgatcgcgcaggtccagccacagcgtgcgcgcctgccgtggcggcaccgacaccgatacatcgatcatgtcgcgcgccggccagatcggatccttgatgcggatgttcagcgggatcagtccatcgtgggtgggcggcaggtccagcgcgggaaggtcgatggccacgccgtccaggccgtcgtgcatgttctcccagctgtaggcccagctgcggatcagcggctggttggccggcgcgtcacccaccccggaaggaatcagcacgtgcacgatcggctgcggatgtgcgggcagggtgccg

SEQ ID NO: 52191 - DNA, 9743 bp, Oryza sativa
tacgagtttatatatgtacacttgttatatatacatactggtgatgagctagctatagctaatggagattgttacattggagagcccgtactctacgcatcatgtatactgggcacatggattgttcttggtgctgccgttgtttgtgcaggtcaattgggctctccttccaaggcatcagcaacagcagctatagctagctaagctgtgatgaagagaagagaagagaagagaagagaggagaagagaggagaagaggcctttaaaatgtggggagcgagccagcctgcaggccagctatcaagctaggacaggcagttattggagggctgcaggtcagatcctaaatccttctcctacacatgcatattacagtctctcactcctctctcactccatatgtatatatgcatccctagctatacatctttctctctccctctgcacatcactgctccgttcttgatttggtttgcgcatttgtctcttgtgctattccttctttcgtcgtcgtccctgctgctgcttctgttgctgctgtttcttctgcgccagcaatacactgtgcaatgtgtgaaatgttcatcaggccggctagctagctactagctggcagcagaactctcatacacaacatggctagtttactgtgcagtgtgtgaacgaaatgccaaggttaatttgtgtgtggaatcccaaacctttctgcgagcaaggagtgaaaaaaagggataaagatgtggattagaaagcagtagtagatccttcttctctccttgcctcctattgggttcttccttttggtgtcaggaggaggaagagagaagtatagaatctccatcatcccggccatccatgtggatagacagcaaaatttgcaggccacattgcacatacactggttgcgcatgcattgcatgaactgaacttgcaggactgcaaatgcacacttgcatcgatatggtagaattaattctgcttcgctccccgactcattcagggtactgggtctgggcgtacgcagtgataacagaagaaattgattattgcgttgatagtagacgagctgcctttttctgctagcttttgcccatgagtctaggactctagcctctgccattaatttctgagtgtcatgctgggtttatatgtacaactggttagctagctgctcatgatctatttaggtcattgtagagattgccgtacgttaattaatattgatactttctttgattaggttcaggctcccatgcatatgccctttgtcaggaattcagtattttcagtctgattggtgttaatgtatcagccttttagcatgtttgcttttaacatagccaatattcaattctattcctatatattggcagatcattctgctgtttcttctgcgccagcaatacactgtgcaatgtgtgaatgtgcatatattatctatgataatttccctttttagcaatgaattacgcatcacaaattataaagtgtttgccaattattaattcgattagtttttgttcctaagattgaatcttcatgcagcatgcatattttctgtacatatgtaatcttgctttaattctgcacaattattttttagaaaaatccctctgttaaacgcacatatgtacatatataggaaataagaacatgcatgtattggttaaattgagccaataaaagttaattgtttaattgattgataaattaaagcacattgcatcaatatatatataagtatgaagaaaagacatcagatatatggtataatcttacaagatcataaagttttagtgtatatatcattgatgtatttataagagcctatagcttaactagatcagagcatatgtgcacattcttgaagcgtaatcaattaatctatcctgtatataggagtattaattaaggatatgtttaattagcaaaccatatcaaattatctaaggacttattgaactgtatgcaagttgaatattggcttgatattttggattatcaatatctatacaaagtataaactggcttcatgaaacactgaataaaagtaccagatatatatcaacataaaacttaattagcatttccccgctaattcttcctgtcatgcattagttacttcgtcaatgctatggtgtgcaacaattaatgtaccattaccaaatattaatttgtttcgaccaacgtacatgcatgtaatgtttgtgttaataataatctgtcactgatagtatatgaatttaagattttgatgagtgatatggttttgagaagagcattttatgcatgccttagttttctgcttctctctatcatgcccccttttcttgattattttcactcaatttcttctgataacccgattatttggtttttatatataagtgtgaaaaccgtagggctatatatatggatcatatattaattcttgcatgtgtgcgtctctctcttaaataaaaataaagctgcacatataagtttggttgttactcctacataagtatcatattcacgtacgtccaaacgtcagcctaatttttcctgcgtgcatgttaattaattaatttgttttacacagcaggtgtggttaattattattaagaatgcaaaccattactatatgcatttggctagccctggatcggcgctttactccttgcaaccatgcgtgtttcattgataaagtagctacttagatatatatgaagttcaattctaattaagctcaaaagatatagaatttattatatagttaggactgaggacaaagtaacgagtttcttcgaatatttatctatatatttatattgttaattaacagaaattgaaaaagggacaccccacattattctagctagaaacctaattaaaaattaccactttaataggagaaaaggagatatttgcattgtcagattttaatggttctagactataacgatgtgatttgattaatattgttacaattatatatgtggcaacagaagctaattagagttttttatcaattgcaatttctaatttaaaatattgttatatttataaattacaactgtacgtgttatggagatagaaactaaaatttgtatatcaaatcaaattgtactattgtatatagatttcaaatatatcaatggaaaaaagaagctaaaaggtgtgaaactaaaaaggtgtatatcaaataaattgtgtgggaaaaatccatgctagttcattaattaccagtatgctgtcccctttttttagataatgagtatactgtgccctttttatgtcttgtttttctaaatccagtgagaggcactctgtctagttcacttgaaatatgtgcaccatatatatatatagtatgcttgatctctagatatactagtattaattaaatgatgaaattgaagtgaaccaagaaatgtcttaaatattttttttgaacgaatagaaatgtcttaaatatcacatataatgaaacgcatgttgtaatttctttaattttctcaatgtacatatgtatcttgtaggatttgctagttgtaattttggcataatctttcgattaattaggcatcattaactagacagagtggtcctctctatatatacacttgatatgtaaaatattgttggcccgtaagcattcttcagagagagtactaaagttagctagctagggacagcgggtatattactatagctagctagatcgatgcatgatcatgaagtacagtaggagacataacacatataaacaaaattcaaaagttgttaaaacgtacgatcgatgacatatggtacattatttgtgccacattgccatgcatatgtaaatgcagaaaccgatcgtttttgaacggcatgtgtatgcaactgagaaatgctgtgtgtgatgcatatgtatgcaatacatatagcgatatccgtagatagaccgattgctttggtctgaattaatgcatgctgcaagtttggatcaatcgatcttctggtgcgggtgatcgacggggaaacggtgagagattgaaattgtagcgtgacatgtatgtatgatctcgctggcttagctagctgcaactaccggtgccgtcactgccgtgccgatctttatatcgctacgcatgcacggtgtgcatggaccatcctaagtaggggagggagcgcatatgtatctcggggacgaccggccggccgcccgcggatgcatgcatccatcaatgcatgtgtgtacattgcatgagaggtgtggggacactcctacttagctacatagctagttaaatggtgggtccagcctaagcattcgatcacctagttcctctccttccaatttttatttttttaaaaaaatgcatatatacatactctccctgtcacataaaaaattaacttctgtctataaatctagatacatgtacgctacatctatgcatgttcgtaacataagttgtttttttttgagacggatgaagtatatgctatgttgtttcctttcatttatacacattaaaaatatgagcgacactcgtatatgctacttgatctctcctattgaaatctcacattaaattaagaggtggggtaaattaccatgctaccctctttatttactctaagtcatctttcccaaatcaaatattgaagttctctacgaagactaatactagaacttagtatagtaattactccattcgtttcataatataaggcgcaactacttttttcagatgttctataagagcaggtacaatagcaagctattagccagctataaacgtattttaatgagataaacaatgagagagatcagcagcgggatacagatttgtagccagctgcagtacggactccaagacgcaatgtgtgtatgacaggtgggaccacatattaatagtatagcaagcaactattgtatgaattggttattagattggctatagatgaattggagttagtagtgggctatactattgaacttgctctaaataagacgtgcatgcatgcatgcaattaattagtacctcttctctattaaattatgattgtttaaaattctccaccctcaacatctctaattctattgggtgcatgtattttatttattagggtgatacaaattaggaggttataataattgtttcttagtctttggagtaagggcgattgtgccttatattttgaaacggagggagtatattattgtactgatgaaacttaggaagggaaatgcaactctaaaaatgttttgaaatatcaaaacgacaagtattttgaaaaagaaagataaatgttataatgataaaatatttattttgccggatcgatcgaacgattggtcgagaccagattgtattaagatttggagagttacaagatatgtatgtattacattatccatacgaaaaaagtcgagatccgagtgatcaggcacatggaatgcctgtccctcgaggaaaaaacatcatgtccaggttatagttattggttactatatctaaaaaatctcttcctcctttcatattacaatctctctcttaaaatctctgaaaatcaagttgcatcattgttcacgatctgcgatcgaaattccgtgtattgcgctccttcccaaccaaccagcacactgtcatgaagagcatatcgaatgcgttcatgtaggtcatctaaaaataccgtacttcctgcactcagacatcatttttttagataaggtctttttttttatccggtctatatatacattcaatgggatatatatgtaacccttttcaattgggaacttagccactcaaacaacccaatctaacattcgctcttatgaagatttgaactcagtttcttagagtgctactcgtcactgtaaccactggactactagccaccatttatttagaggaaagattgttctcgcccgaaagctagaagtggcatttatccatccttttagcatcttcctgatttgggttggtgtatgcacgcgctacaaataggtggtgacaatcttcaattcctgattcacttggcacaggggcagctcgattgatgtgggcagccacgaacgacaagtaaactaaaacaacaagtggtattctctctcttctttctctttcgtcgctcgtataaaagattgtacgttgcaatctcgtcctaaacagtgacaccatagtactgcgaaagcctttatatataatttacgaggatgtcgatccgccgaactaaatgtgacgtgcctcatatatatttacttatcagaaacaagctagtgctttgcacaaggatgttttgactcatatatattataaactcaaagagaaaaacaaagatcatacgactcaattcgtgacactaaagcctcttttagaattgtggatttttgctgaattttacggggaaatggactaaatattgtaaaaattctagaaaattctcgcgtctcagaagagccctgtaaattgtcccagtcatctagtaacttctgatctaattaatgcataagaaccacgaaggtggagctaggaattaaggttgtgtttatttcttttcaaagttggaagtttggtttgaaattggtacgatgtgactgaaaagttgtgtgtgtatgacaggttgatgtgatggaaaaagttggaagtttggatccaaagtttgaatccaaacacagccttactaaggtcagtgatcaatcaatgaaatttgtcaaatcttcacatttttcatttttcttagatgaatttacaagggattaagcatacaagcctatatactgtcctaggtatgtacaggtatgtacatgtttccatgcatgcatacaacctcctcgatctcactcataccatatgcgcagtcgtgctcttttggaattgatagttgaaaatcttttatttcgttttggtgtaataccaaaataattactcggtagattctaaggtattaattggttatcttatccgagggatttagggacttgtacattaattattactcgatattttttttcaacaacaaaatttattagttgtgcgtctatcaattcagggtggagatgcaatacgtacctagaatcgagcatgtggatagcgtccaatgtgctggtgctcgtacttgtcatatggctattcgatgattcgtgtaccccatttgtaaaaaaatatagcaatttatatagttcaaatcttgttccaaacataatattgaacatcaagatgattttttttagcactaaactacccatactatccatatgcttcattatcacccaaccagcttgacttcacacccactcgagcacccaaggagacaaactttattaatagatgtatcaaatcctaaaagttgttatattatgagatgagaaaagtagtagtatgtgtgtatatatatatatatatatatatatatatatatatatatatatatatatatatatatatatatatatatatatatgactctgtcatgcgtcttgatcggtaggtcgtccgccctgaaagttacatgtcagcaattatagtgaaggggttaactactgtttggcacatgtccacacgtgaaatttggttcaatttctggccagtacaacatccatatgatccttggttgattgatcctgtaataactgtgggtccgaataatatcacatcaactacgtacttgtaatatttgtgagtactactactaattgcattgcatgtcagaggagtatatttgttcctacgtacggtagaccaagctagacatggcccaccactcatcggcttctactcatcaagagctacaaataattaagcaaagtgagagaacggttaaccatgcacactctggcttaatttgcatgctgaaaggggtgtactgctgtgctggcagtaggtaggtttgcagtagtacataaagtgctaaagcgcttttcattgtgcaaacagtgaaaggtaattgtttccgagaatttcacagcttttttcaacaaagtttagcttggacaacatggatctaactagcttccaaatagataggggtaaaaaggaaaagttgagagtgataaaggtgcaatattctactccctccattctaaattgatctacatatttcatagctacaccaagacaaaaaaaaactaataactctctcatactacatttactccagcaacaaactcgatgcatgcaccatccccattatttcctagccaatagcaaatcaagatattgcatgtgggttataaatacttatgtgcatggatgcatgcatcaatgtccatttactccaatgcgcaaataacgaatagacttaatgaataaacacaaatatatagatcatttaggaataacctcaaaaaaactatatgtagatcaatttggaatggagggagtatgtgtttacagttagtggaactagaaattttgctttaagatacatgtataaccatgtatatatttacatatttttgcccccttctcatgttcgttttcctgactgcgctctaacgatataacattttctttcaaaagaaaatactatttatacctttgtcaagttggaattaatatatacagttgatctggagaagagagataaggcatcatcctttgaacatgtcctttcatactcgcactatatatagaagaggaaagattaatttatacatacactatacagagaagataaattaatttataaatttccaaattcatatctaaaatttacatattactaactggtcctgtggtgctttgtcagacgatctggtagaattttcgtttggacgcgggcggcggatcaaataatgggctatatcttctttttggactttggagaacgattgacgctgatctgtcctatatttgcagcacctgtttgattggtcccccatcggattaatcatccaacagagactcgattttcgtgcaaagatagagggaccattagttaggaattgaatatgaaaatccatctaacatactgtatgtacgaaaaatcaagctttcaatctaacaaaacgtcttaaaagcttttgtttgtactgtgcattcgcccttctagctcgatctcaatgttgatggtgcactagtacgatcgcctatttaatttgcctattacgacaagtcgtgttaattgggcttgagacgcaaaacttggtgggatataagcatatttatgcatggcagaactagaaactaaacaatattatagatgctgataggtcaacaagtgaaaaaaatactagtcaaaaatctcccttatgtcatctaggaaacattcatgcgtgcgactaaaatccatatgtaagacgggtccgtcgagccactctaactaattaaaagacgacagaaatggattgttctaattaacatgtttttatgtcccaacgaatatactccctccataaaaaaggaaagaaacctagtagaaaatacgacacactagatagctctactgcgtctttgtttttctatacaacagagggaatattcttttaacaagatgcatgaagttctattaaactgagtgaacaatttgaacattccagatgtatttcactgtcatggccaataagtaaaaagtacagctgtgtgtgttacactttggcagttaggctatactgtcgattagtacgttcaggacgatgtatcaacgaaccccctgatgagaatccaaacgtgctaattggcatcactttttctagctagagatatatacgcagaaaacgtgtatatatatgtgtggaatacgcctaagataaggttccaatcagg

SEQ ID NO: 52192 - DNA, 1360 bp, Oryza sativa
agagagagagagagagatggggagggagggagagatgggccgagaggaattcggcccatcgaacctgagggaggcaaaatagacttttgcggaggaatttgatttgggacggattttggattcgggattaagcttgacgatagatcggggatttgagatctgagatggcacggacactagacaacaagcaaagaaacagatttcgcaattaaggtttttaagagatagttttcccgctaggcgccacgacggaacgggcgctacaagatctaacctaatcggctgccctctactaacagatgttagccgattgtaggttaggtagcgatattgttagagattatgtatgatatatgataacacgacgaattacgtaaacaagattagagtatcataaaaatggaagcactaatcccgagaacacaagccgtcataacaagttttacctcttgttgaagatcgaaaccgatgcagctcaactcgaaagcaggaactcgttgaaataaaactaaagcaaaaaggtggcgatgcgccgaaattgtattgaacgtgtgttgttgttttttacatagggctcggggtctatttatacccaagaattacaagatatgtccataccggacacgaccattatctctaacaaactctaatataccataagtctttgcggcagacttttgcccaaacatatctctaaggaaattacataaaacatcctaattaatagatacaattgccttctcaggactctatccatgtgcggcaatcatcttgaagcacctcaattcaacccgatgtcatacaccaagtcgtactgtcgtaatcggctgcatcggcttacctagtccgacttagacccagccgatcctaatcgtaaccgatctggactccagccgattcttgctctgttctcggatagatctctgcctccgactccacttcgatctaatctccttttccgatgccgatgttaccaaatttggttgttaacaccccccccccaccttgccggcaacgacgacaaccacatcgacgcgagcacaaggtatgtgagcacctgcttcccctccgccctgggcgccgccgccatcgccaccacagccgcctccgccgtcgcccacagcttcccctcggcctcctcctgtcgcccacaatcctgctccacaagcttgctgtgtgccgcctccagcgcacgcgccgcgccgatgacggtgtgcacctgctgccacagccccttcctctcccgcagcgcgagctctcaacgccgcctcccgtcactgtcggtagcgctcgtgcacgggaaaaggataatggaagagaggggaaaggggggaaaagttgtgtttcactgacatgtggg

SEQ ID NO: 52193 - DNA, 712 bp, Oryza sativa
aaagtttagaaattcaaagtaaaaggtaagtaaataaagtaaaccaaacttgcaagataagttgaaacagttggaaacaaggttacaaattttgtacttttgaacatcaggtttcaaaagaaataaaagaaagttataaaatcaacttgctaaatttattttattgcagcaagattaaataaaacaacattgtaaaacttttgctggaaaatgagccattagtacagtaatagatgtatagtactaataacactggaataaattttgaatgagaaccattaaaagagattatgaagtgcatgtgccattagtttggtttaattaaaaaagaaagggaggagaacagttctacttttccaacatttttagagggcttctatggataaccatttggcataacctaggttcaagggagctctgataccaacttgtcacgcccggaatttctatccaaaattccaaacgcttacatgtgtgtgaaccctcgtccaggaatcagccgaggcacacaataacaaattgataatagagtacaattattactctaattaataagcgtataaaatgtcattacagaggtagatagttcctctcaatcaataaagatctaagcagcggaaaataagataaacggcgcagacggctccactccacaggcagcttgaccaaggctacacctaatcctccacaccatcagcttcactgtagaact

SEQ ID NO: 52194 - DNA, 1930 bp, Oryza sativa
gattaatattgtttattacttaactgttttatcaaattctcaaatgtttgctaaatgctgcttttgcaaatgaaaccctactatgccatactttgttatcctgtgcacttgcatatttgctgcgtggcttgctgagtatgtcatatactcaccttgcaatcattcatcagaggaagagttctacaatgatgctgatggtgtggaggattaggtgtagccctggtcaagctgcctgtggagtggagtcgtctgcgccgtttatctttttttccgctgcttagatctttattgtttgagaggaactatctacctctgtaatgacattttatacgcttattaattagagtaataattgtactctattatcaatttgttattgtgtgcctcggctgattcctggacgagggttcacacacatgtaagcgtttggaattttggatagaaattccgggcgtgacaccgacttccgtcgatttcgagggtaacttttatttccgctaaaagtttttggtttttgggtataccaaccattcaccccccctctggttggcttagttcttgtgattcgatcctacatggtcagttgtttttattttatttttaggaaagattgtttacagtctgatcaggacttatatcttttactttatctttaggaaagtgttaatagtgaaatttcgcaagatagatttggatttggagttggatatcgaagtggaatcaaaggaaattggatcttgacaaaacggactgcacatcagctggaaacaaagtcactgtttgatcgagccgatatggcaagaagccaatacagcttggcttgggttcagtttgggcctcgatttagataatcgtcattgccgcatagagatagagcttatttaaagcaattgtatctattaattaggatattaatgtcagtttaaattagagatatgttaagagtctgccatgtggacttatttgttattttatctttagaaaagtttgagacgtgttcataatggacaagttttatactcaacgtataaatataacaacaacaatccaatcaatacaactttcggcacatcgcaacttttggcgtgttgccacccttttcttttttacttttcgatgagttcttgcttcaagtcggggcatcggctgcgatctcttgacaagtggtcacttatctcgatagcttgcgctatcaaggctattatgtcgctttagatgcattagtccttttaatgtaaaaatgaaatgaaataaccaaaatccttttatgtaaaatttgagatatgccaccctatatttgcaaaatttgagatatgtcatccgtatctcaataacatgtaggacccacatgagtcaatgacatgtgggtcagggtggcatatcacaaattttgcaaaatttgcatggcatggttcaaattgtcccttaatttaggagtgtatatgtcacgcccggaatttctatccaaaattccaaatgcttacatgtgtgtgaaccctcgtccaggaatcagccgaggcacacaataacaaattgataatagagtacaattattactctaattaataagcgtataaaatgtcattacagaggtagatagttcctctcaatcaataaagatctaagcagtggaaaataagataaacggcgcagacggctccactccacaggcagcttgaccaaggctacacctaatcctccacaccatcagcttcactgtagaactcttcctctgatgaatgattgcaaggtgagtatatgacatactcagcaagccacgcagcaaatatgcaagtgcacaggataacaaaggatggcatagtagggtttcatttgcaaaagcagcatttagcaaacatttgagaatttaataaaacagttaagtaattaaacaatattaatccaacgctatacaacataccctgttgta

SEQ ID NO: 52195 - DNA, 707 bp, Oryza sativa
catcttaacaagcacataggttgaagaataaacactaaacacatatacttattgcatttatcactctttctcaaataaccttgagcacaaaataaccaagaagttttttttaactttttcttttcttgagcctttttgctcatatttttctcttttattccgggtacgtccctgtcgtcaagactgtttccagggattcggcacccattattttgctcacatcgaatacgtccttgtcgtcaagactgtttccaaggattcggtattcattttttatattttttattccttctttcacaatgagcaattaaagctatttgaggaataacaaatcaataaagcatatatatagagcatttataaatcaaaccatatgctagcatcaacattgcatattttcttaattcaagtatagaatttaagtgtcatgcatcatctcccttaaaagcaaaatctaaatctcatgaaaagactagaatacatactgtcacgcccggaatttctatccaaaattccaaacgcttacatgtgtgtgaaccctcgtccaggaatcagctgaggcacacaataacaaattgataatagagtacaattattactctacttaataagcgaataaaatatcattacagaggtagatagttcctctcaataaataaagatctaagcagcggaaaaaaaaaaaagcgcagacggggtgcaggaat

SEQ ID NO: 52196 - DNA, 921 bp, Oryza sativa
acaccaaacaagtactcaggcttgaagcgcggcatctaaagacaaatgaaaggagggggttaagacatttatccaattaatagcacaagtttttggattaatttgaataaagtttagaaattcaaagtaaaaggtaagtaaataaagtaaaccaaacttgcaagataagttgaaacagttggaaacaaggttacaaattttgtacttttgaacatcaggtttcaaaagaaataaaagaaagttataaaatcaacttgctaaatttattttattgcagcaagattaaataaaacaacattgtaaaacttttgctggaaaatgagccattagtacagtaatagatgtatagtactaataacactggaataaattttgaatgagaacccttaaaaaagattatgaagtgcatgtgccattagtttggtttaattaaaaaagaaagggaggagaacagttctatttttccaacatttttagagggcttctatgggtaaccatatggcataacctagggtcaaggagctctgataccaacttgtcacgcccggaatttctatccaaaattccaaacgcttacatgtgtgtgaaccctcgtccaggaatcagccgaggcacacaataacaaattgataatagagtacaattattactctaattaataagcgtataaaatgtcattacagaggtagatagttcctctcaatcaataaagatctaagcagcggaaagaaaagataaacggagcagacgacttcactacacaggcagcttgaccagggctacacctaatcctccacaccatcagcatcattgtagaactcttcctctgatgaatgattgcaaggtgagtatatgacatactcagcaagccacgcaacaaatatgcaagtgcacaggataacaaaggatggcatagtaggg

SEQ ID NO: 52197 - DNA, 7201 bp, Oryza sativa
ctacgcatgcatgcatgaagttggtacgtatagtacgtagctagctctttcaaattgttgtggaacgaatccatccttccgagttgaattaggtttcgacctgcgcgcgtcgagagaaattaaaatttaagagaatatcaaataagatatagttcaaattgttgtgtatcgatcgatcggtatatcaaataagagattatagttcgttagctagtacgtacgtcgcggatcggaccgcgttgctcgatcactatatatatctgtcgatcattttgctcctacgtcgtactcaaaccaaggcaaaatctagctctccatccatctctctttctgcttgcattgcgtcctctctctctctctctctcgctgcttgcgatttcattcctttcctgcttcaggcagctgcaattaatatcgtcgacaccaggatataaagctccatgtacgtatatccaacaaacatctcagtaaagctgcacgcatgcgcgttcggatcttacattttctgtacgttttttatcttcagggcaaatgctgatggcatttcctttggagcgggtaggggcagtcaaagcacgaggcagcacaatgctagtaattctcattcctaactatatatattatgttgcttagtttctgaattctccgggcaatttattttgtttttcagtccgaagtgctacaggtgggcagtttactatgccttcaggtatgacacggtccgatcaaagccagatggcccggttgcccaattctcaacgtcatgggcacaacgagatgacagaacgtaagaaacatatcaataaacatactccatcggtatgtaaatatttaacgctgttgatttttttaagcatgtttaaccgttcgtcttattcaaaatcttttgtgaaatatgtaatatatatatatatatacacaaaagtatatttaacaatgaataaatgatagaaaaacaattcgtaattacttaatttttttaataagatgaatagtcaaatattttttaaaaagtcaacggcgtgaaatatttagagagagatatagtatttattaacctatctatttcattttagttactcaatattcctaccttgcataaccggtttattttattaattcttcagtggaaaatgtagctcgagcctcggcgagtactgtacatggtactggccccgaatcacacagccgtcaaaacaaccaggaggtgccgccggcgtcatcaggcagggactacgacaccggtttaactattttatacacttgatgactatgttttgtgtgcaagctagtcatatcgtttgtatatatcattgactaactcgtttctctttttttcccttgtctatccagatttcaacgatcgaccatttaataagaaatctaaaaagaagagtacgtctcattgcattttttaagccaagtacgtcattatcttcaaacacagtatgttatcacatagatagttgatgcatgcaagtttacggatcgatctacacacatgtgtgctgacgaaacatttaattttctttctcattgacattacgcaggtgatttgtgactagtgagaggatgcaacaagtaaacctttaatcgacgacctctctgcatatatacaagctttgtgagcataatggccggaagttaattatttggctgtcagcaaacccccccccctcccccccaaaaaaaacacatacacatacacacaaaacatacacacaaaacgtagaggacatatccggtgaaaatgagctaagtgttgaaaactcgtgaaaatcatacctaaaagtttcgtaaatttatgaaaaaaatactagagataggtgtagatataaaatacattctcaccaaatcttaactccaaactcaagttcgttatcagaaacaaaaaagacaaatttcaggtgatttcaggtgaatagtgtcctgttactattcacctaaaatttgtcttttttgttactcctaaacgaagttgagtttgaacttgagatttggtgagaatgtatttcatatctatacctatctctagtatttttttcatgaatttacaaaacttttaggtatgattttcacgagttttcaacgcttagctcattttcaccggatatttccctgcttactttctacttgtgttgtccggccattttatattatctgttctgtcagggttaagtgtagtagatacaacagatgggtaaaatgagctactttctccgttccacgatataagattttctaacattacccacattcatatatattgatttattaatatctatatgaatatgggcaatgttagaaatattgatttattaacatctatatgaatatgggtaatgttaaaatgtggacaatgctaaaatgaaataggtgccggttctaaacatggagccgagcatcccctcgtctactctactcattgagaacaagcacatccgcatcacattcatcaagaacaagaatgaacaagaacattcatcacagcaagcacatccacatccaacattcatccacaacacaagatttggactcaaatttatgcaataaaaaaaagaagggattcacacctcgtcgtgccacctcccgtcggcgagcccgccgcctccctccggccagcccggcgctgcgtctcctctgtgaacccgccgtggcaccgcctgccgccacctagtcccggcgagcccgccgcctcccctcccgccagatctggcggaagggaggcgtcgcccgccgctgccgcctcccgccgccgcaactgcagcctccctcctaccgccgcaactgtagcctctcctcccacccttgccgagcacctaccgggccgatgccgtcgccgccgcccttcctcccgccggatctggcggagggaggcgcctccgggccgccgccgctccttccgccgcgcaccgccgaagccgccgacgccgcccctccagccgccgtgagcgagaattataggggagagagagcggagagaacgggagtgctggctcctcgacactatctcctcgatcttatctcgatgctagtggtggggcccgccgtctcagctcatcccggctcggctcaattagctggtgccgcatctataacaagtcataggtgccggtttttaatattaaaggtgtcggtttttaatattaaaggtgccggtttttttaaaaaaaccaacccaaatgtaataggtaccggtttttatttagaaccgacacctataattactaaaaggtgtccgtttttacgatttcagcccgcactattggaacctatagtggcgacacatatttgatattttgtagtagtgcttctataatccaaaaataagtccaccatctgcctggcacactatggggtataggtatggcatacaggtcagcccccgtttgatttttggttcctataggtatgtccgttacgcgtggtgacagtttggccacatgccaatcgtcaccaatttgagaaaataacttttcataaaaatataattgtggcctctcacatgcaatcacatgtcatccccttatatcttcttcttcctcactctccctcctcttctctctcatgccaccgcctcatcatgcaacctgctcgcctgtgcttgttgtggaagaaaaggaacctccacgagtgcgcctggccaccgtcgagctcttcacgcgaccatcctccacgagctagccagctccactcatcactcgtgtcctttatgaactcgatggcagcagcccactcgctagcacaagccaatatatcaagctcctaacctgatgaggaacacgcatgcccacgtgcattgagcaggctagaaagaaacaaacggtccagagcacatatttgttgaatagtatagggagataggatactatgaatattggagatgttgtatctgttgtttttataagcacataatgatttaatttattccataaataaatcataacattgcagatgtaaactagcatcaacacatcattagatttacatatgtaaactaatcagtaaaatatgaacaaatcaaatatgcgcaacatgttgaacacgtaccgagggttccggatgaccgctgccatgccatgcgaggcaaggcgagcacgtgtgtgttccccctcttctctccacctcacatgcttaaagtggtaaggagggcatcctcccttttaaggaggtcccctgtctagaatgagtaaggaggttctaaactcaccatgcatgccatcccatgaggtgggcttttgtgattttctaaagaattaatcttcgagtgggctaaggcccatctattaattccaacagtattgagcctccgaagccagtatatatagaagtacatatggagtagataaggaaggattacaaatatggaagaaatctactacagatgaatcatatcctaatatgactctaccatacactctaacaatattcacatcaaacagttcgaatggctagaaaataggctcaaagcggcgaccatgcatgtcttcttagactaccgctgccatggaaggagggtagcgggatctagctacaacgaggacgtaaggagatcaagcggagagagatgggatacaaatggttgtgtgcagtgctaaagagggaaggatgccgacggagacgacgagctctgcgcttagctcaccggtggccctctcctccacgtggctatccgatcgggtcctacccccaacagggacggtagcgaggcagccaagcgagtaggcccattatttatttataattttagagctgattgtatatcacatggaacggaaatcactttggagtgaatcaggggtataatttgtccagttaaaaaagtttgggggtatgaaatatcttgtattagactttaggggtataaatcgaactacgcaaaggttagggaggtaatttggatttttttttccccaccacaattccatgagccctgctgcaaaagaaaaaaaataaagtgggacctgccataatatttgttgatttcgttcttgcttgccagtgataagtgatcccccaactccaccatctccagagatgccattgtcgtcctagtcgaccaccgtagtctttagcacccaaagaagggatccatcgcgttatgccacccatgcaatagttgatgccccccgtatgcccagtagcctgctagtggattgggtgggaatgggtttattggattggatttcctcttggattgtgtttggatggtttgtaatgggctgaggaaatgtgggttggtgtggtttggatttggtcgccgtttttctggactagaaatggtttcaatccatgggtttctattggatggcagaatgggcacaacccaaaatggttgccgtgcatcgtcaatccccaattcctcttctcctcgacagccaagtcaacacgacaaatcgctcgatgcaccgccgctgtgcttgccaatgctttcctcgctgccgtggctcgccggcgagacgcgcaatctggggcaagcacatgtggtggcgaggtgagggcgatggagcgtgcgcggggggcgtggaaggaggtggagctcctggacgagcggcgtgactagcggtcactgctgcaccgacggtccagccaccgcagctaccttttgctccgcctcttccgcgccggcaggcagccgttgccatcggtgacgatggcgccatggagttttgcttggaggtaattgtggcaccatggattagcctatgccgcgcgaggaagacgattggttcgtcaaggtcagcatccttgttgatggtcaatggattgaaatgggtttgagtggtttggaaaggtggattgaatccatatgaggggaatggattggcttggtttggactgaggtagaaaatgggttggaatattggtttgggttctaaaagttgatttgtggactggattggtttgggctactttaactggttgtcatggtttggactgggaatggtgcgggttttgatccattggcaggctttattgctcacatcccatcaccatcgatgagttgctgccatttcgccaacctcctattcaagcttccccgcgtcactctcctccatctaggagttgattcttggatgctccgacacaattgattttttggatcagttttctagttttcaaggatctagtagcgagaaaatatcttggattggcttcttaattagcaacatgatttagaatattcaaggatgtgttcgagagaaggggaaagaagaaaattgagaagatatgcataacgagataaaccattaatgcatgatctattacatattaattattttaaacataaaaatgattaatataatttttaaaacaatattttttttattttttctaaaaaaacacattgttagtagtttggtaagtctgagcgcaggacaccagctatttctcgtatcgttcaaataatctgctttgggtgtgtttagttcacactaaaattggaagtttggttgaaattaaaacgatgtgatgtaaaagttggattgttatgtgtgtagaaaagttttgatatgatcgaaaagttgaaagcttgaaaaaaaattttgaaactaaagtcagctttattagtactctgctgataatctgaatctgcagcttaaggtgacctatgtgcttgctcttgcccgccgccaacaggagctactcctactcgacgtgtgcatccttctcctgcgcctcaacaacagtattgattgagggtgtttttgattcatggtcatgtatggataggatatagccatctatattttattgaatatggtgatttaattttctgtttggtttgtatggatatggcgatccaatttcttgtttggttcgagggatatagcatagatgagaaaagccaaaagttagtaggacccatttgtcatatatatatatatttatcaaaatataatcatccgagatcttgttttaaagatttaattacaaatataatggtgtaatcaaatcataaattagataaatggtttagaagaaaaaatcatttggagcttgcttaagaggacaaccacagccaatcggaataggacacttcacccagtccaaaactggatggcttcatccagccaaatcggccggatgcactcatccagcatagtaagggaatactctctattatgtaccgtctcatccaccctgacctccaaccaaacaccacagaaactcgagcggtcatctcccatccagactc

SEQ ID NO: 52198 - DNA, 751 bp, Oryza sativa
tttatgctaagagttgaattctcataaaaatgtgatcctcgaatttttaatagacaacacctttgacttgaaacatatgtttgactaaccatcttatttagaaaatcttgtacaaatatgcttaaggtacaattaatgataaaccaagtaacaacaaaataaattataattatatatttttgaaaattaaatgaatggtcaaacgtatgtataaaagtcaattgcaccattaaaaatcggggagagtatagtataaccacataactttcattcattataaccttactatttaaaaactatgggtgtatttagttctttaggtgtaaagtttttaagtatacgggcgcacatttgaaatattaaacgtagactaataacaaaacatattacatattctgcatgtaaactgcgagacaaattgattaagcctaattaatccgtaattagcaaatgtttactgtagcatcatattgtcaaatcatggcgtaattagactcaaaagattcgtctcacaacttacatgcaaattgtgcaattggtttgttttccccacatttaataccctatgcatgtgtccaaatatttgatgtgacgtttttggtcaaaattttttgggatctaaacaaggcttatataaaaattgaaacggtgatggtggccaatgctgataaatgtttttttttggtaaaagatcatttcgccatggtagcgcattccactgggttccttattccgattgcgtgccttgcct

SEQ ID NO: 52199 - DNA, 552 bp, Oryza sativa
ctggttaaataggcttgcgattttgtgaacagtccaacggagcagatggagaatcaatgaggcatccttgagagaggcatatggttttggctgtattagtttctccttaatgaagtaataaaacaagcataattaaatcgcgtgcaaccaattagtacatcgtgacaaattttttgttttcttcgggagggtagctgtcagatgctaatggtggttgtcctgacgtgttacgtgtatgcaccagatgaccagaaaccccatcgttgcatgagttcatcgccgtcagatggtgaaatgagtgcctgtgtcttcgttggcactcgtaaaatattgagccaacgacttcagagaatagaacggcgatggcccaccatcccacgaaaggtaccaaaaggtgctggactgcaaattcgaaattaacaattttcttaaacaaatgcataacgtagtacgatatttcgtattgagagagcataaaaattataaatgtacagttctaagagaatatagcgaaaaaaaaaacaccccataacagtggctaggggtggacgt

SEQ ID NO: 52200 - DNA, 610 bp, Oryza sativa
aggaagtgggcgtgaagaaattcaagaacttccctaaccgaagtatgccctcacccattaccaatctcctgttcatcagaagggcctattcttcacaaggtagtagcaactagcagttgattgctagacattctttatttcgcgcaattatacctgaagctaaatttaaatagattaaatatacatccctcacttctacatccaaaagaaaaatatatatgtatacatgtttttattgcatgaaagatacacatatactatgaatgcgcatccttaagtacgtatagtacatatttatttcactaaatttctactaaaatcttacccacatgtttatagacactggtatttaaatcctagtgtacggacccatacacacatgatccaccacaatacctctcgggcctccccatttgcgagtatattttgtataaaactatatttaccaattcacacagttattataatttgacccaactcgattaagtgatatttgtagttctctttttctaaggataacatgatacctttttatatgtctggagcgaacttgttggattttcttcatatatactctcttataataaagaccagagaactttatccataa

SEQ ID NO: 52201 - DNA, 804 bp, Oryza sativa
ccaagcctacttgtcggtctcccgagccgtagccactatcacgcgtcaccgccatgaggtccgcaatgcgcctgcaccacccacaccaccatgcctgctcccgtgccgaaccgcctctttggcacttggctcagtgacgatgaaagcaaagagcaaatttaattagcctgaggataaatttctctactcggataaaatctaacgtcatttactcaaaatgagacggaaatgctacttatcagaaggaaaatcggtgacctgtgcttttaacttaagaggaaaaaaaacgtgtgctaatttttttacccttttttcagatcgaattttctctcaaatttttagtcaaagctatagcacgtgccacgtggaaagaggtgatacaatattttatttttgcaggtctcatcggatgaaaaaaatagataatggtggacttaggtgatatgacttatctatagctagcagttatagatagttcaatttgtacatgctataagacaagatttgattcattttttctttttttaaaaaaagaacagagcaactaggtagcgcctcaaataagacaacagtatggtcgcagctgctcgaaaaaacagaatgcatcactctggtatattccttttaagtttgagggaatctggccagccggccatgcatatagaacccacttaggctgtgttttccctttaaacttctaacttttccatcacatcaaatgtatggacacatatatgaagcattaaatgtggatgaaaaaaaccaattacacaatttgcatgtaaattgcgagacggatctttt

SEQ ID NO: 52202 - DNA, 597 bp, Oryza sativa
gcccggtacggtgtgcatgcacgaacacttttacttcttcgagtgatcatttgagttttatcttatgccaaatatcattaagttcgaccatattataaaatgcccctataaaaatatacagtaacatccatcattcaatatatttttatagtatatttatttttaacataaaatgttaaaaatattatattttttaaaaaataattaaacttaaaaatatgacataggaaaacttataatataaaacggagagaaagagagtactatttaaatatttaaacattgatggaccttttacccttgctagatctttacatcagaactcttcagtgcctacctgacacaaacaatagtgtaataaaaccattttacatttttgcgagggtaataaaacctttttatggctctactatatggcatatgtacctccattgcatattgctatgaaaaaatagaatggtttctaagacatatgttcttgaatgtattctaagacatattctctcttttcttgtaaaaaaattataggcctaataatttgtaaaagttcaatggaacattatgcatttcaaataagggacaattactaatttgact
